(19) United States
(12) Patent Application Publication
(10) Pub. No.: US 2015/0099798 A1
(43) Pub. Date: Apr. 9, 2015

(54) VARIANTS OF YEAST NDI1 GENE, AND USES THEREOF IN THE TREATMENT OF DISEASE ASSOCIATED WITH MITOCHONDRIAL DYSFUNCTION

(71) Applicants: THE PROVOST, FELLOWS, FOUNDATION SCHOLARS, AND THE OTHER MEMBERS OF BOARD, OF THE COLLEGE OF THE; HOLY AND UNDIVIDED TRINITY OF QUEEN ELIZABETH, NEAR DUBLIN, Dublin (IE)

(72) Inventors: Gwyneth Jane Farrar, Dublin (IE); Sophia Millington-Ward, Dublin (IE); Naomi Chadderton, Dublin (IE); Mathew Alan Carrigan, Dublin (IE); Paul Kenna, Dublin (IE)

(21) Appl. No.: 14/367,004

(22) PCT Filed: Dec. 21, 2012
(86) PCT No.: PCT/EP2012/076697

§ 371 Date: Jun. 19, 2014

(30) Foreign Application Priority Data
Dec. 21, 2011 (EP) 11194796.6

(51) Int. Cl. A61K 48/00; C12N 9/02

(52) U.S. Cl. CPC A61K 48/0066; C12N 9/0036; C12Y 106/05009
USPC 514/44 R; 536/23.2; 435/320.1; 435/189; 435/325

(57) ABSTRACT

An isolated nucleic acid sequence encoding the yeast NDI1 protein of SEQ ID NO: 542 or a functional variant thereof is described. The nucleic acid sequence comprises at least 50 codons which are codon optimised compared with the sequence of yeast NDI1 gene of SEQ ID NO: 1.

### TECHNICAL FIELD

[0001] The invention relates to variants of yeast NDI1 gene, proteins encoded by the variants, and the uses of the variant genes, transcribed RNA and proteins in the treatment of disease, especially neurodegenerative disease.

### INTRODUCTION

[0002] Leber hereditary optic neuropathy (LHON) is a maternally inherited disorder affecting 1/25,000 people, predominantly males¹. Loss of central vision results from the degeneration of the retinal ganglion cell (RGC) layer and optic nerve². In over 95% of patients the genetic pathogenesis of LHON involves mutations in genes encoding components of the mitochondrial respiratory NADH-ubiquinone oxidoreductase complex³ (complex I), which is involved in transfer of electrons from NADH to ubiquinone (coenzyme Q). Complex I is composed of forty-six subunits, seven of which are encoded by the mitochondrial genome, ND1-6 and ND4L. Mutations in five of the mitochondrially encoded subunits of complex I, ND1, ND4, ND4L, ND5 and ND6, are associated with LHON (http://www.mitomap.org/MITOMAP). There is growing evidence that mitochondrial dysfunction may be involved in a wide range of neurodegenerative disorders such as Alzheimer disease (AD), Huntington disease and dominant optic atrophy as well as multifactorial diseases including dry and wet age related macular degeneration (AMD), diabetic retinopathies and glaucoma⁴. It is perhaps not surprising that a tissue such as retina, with the most significant energy requirements of any mammalian tissues, may be particularly vulnerable to mitochondrial dysfunction. However, it is notable that such a dependency on energy metabolism in principle may provide an opportunity for the development of therapeutic interventions for such high energy-dependent tissues where a shift in energy metabolism may potentially provide substantial beneficial effects. Complex I dysfunction results in an increase of reactive oxygen species (ROS) and a decreased energy supply⁶. In mitochondria, ATP synthesis is coupled to oxygen consumption by the proton electrochemical gradient established across the mitochondrial inner membrane in the process termed oxidative phosphorylation⁷ (OXPHOS). Mitochondrial complex I mutations leading to respiratory chain dysfunction are hence linked to reduced oxygen consumption; a reliable measure of overall mitochondrial activity.

[0003] Interestingly, many LHON mutations are not fully penetrant, it seems that the appearance of the pathological features of the disorder may be influenced by genetic and environmental modifiers. For example, it has been observed that the T14484C mutation in the ND6 subunit tends to be associated with a better clinical outcome and at times recovery in visual function⁸. Furthermore, there has been some suggestion that certain mitochondrial genetic backgrounds may render patients more or less susceptible to a variety of disorders including LHON and that this may be linked to variations in oxygen consumption, the efficiency of electron transport and ATP production⁹. For example, the G11778A and T14484C LHON mutations on a mitochondrial haplogroup J or K background have been associated with an increased risk of visual loss¹⁰. Nuclear modifier genes can influence LHON progression and severity, for example, an x-linked modifier locus has been reported¹¹. Additionally, smoking has been suggested as one of the environmental factors which can influence disease penetrance¹². In addition, the male prevalence (5:1) of LHON may at last in part be influenced by oestrogens¹³. An interplay between the primary mutation, modifying nuclear genes, the mtDNA genetic background and environmental factors may collaborate to determine overall risk of visual loss for a given LHON patient.

[0004] While significant progress has been made with regard to understanding the genetic pathogenesis of LHON, development of gene therapies for LHON has been impeded by the need to deliver therapies to the mitochondria of RGCs. In addition, intragenic heterogeneity has made development of therapies complex. Allotopic or nuclear expression of mitochondrial genes is being explored as a potential therapeutic avenue for some mitochondrial disorders including ND4-linked LHON, although modifications may be required to facilitate import of expressed proteins into mitochondria^{14,15,16}. A nuclear complementation approach using NDI1 has been considered as a potential therapy for Parkinson disease (PD)¹⁷. Additionally, recombinant adenoassociated virus (AAV) serotype 5 delivery of NDI1 into the optic layer of the superior colliculus of the brain, has recently been shown to provide significant benefit in a chemically-induced rat model of LHON using functional and histological readouts¹⁸. Whereas this represents an exciting and innovative strategy making use of transkingdom gene therapy, the mode of delivery may not be readily translatable to human LHON patients.

[0005] It is an object of the invention to overcome at least one of the above-referenced problems.

### STATEMENTS OF INVENTION

[0006] The invention relates to variants of the yeast NDI1 gene of SEQ ID NO: 1 which are codon optimised to provide for improved expression in mammalian cells, and/or modified to encode an immune optimised functional variant of NDI1 protein. Codon optimisation involves replacing codons which are common to yeast cells and uncommon to mammalian cells with synonomous codons which are common to mammalian cells. These are known as “silent changes” as they do not result in an amino acid change in the encoded protein. Codon optomisation provides for improved expression of the nucleic acid in mammalian cells and/or conveys less immunogenicity. Immune optimisation involves substitution of one or more amino acids (i.e. see Table 1b), for example from one to ten amino acids, in the protein to provide a variant protein that exhibits reduced immunogenicity in-vivo in humans compared to yeast NDI1 protein. Examples of possible amino acid changes include conservative amino acid changes at one or more of the following positions:

[0007] L195, K284, K10, S143, L502, L403, A387, S86, F90, L94, K196, L19, K214, K373, L259, K511, L159, R479, L483, I82, F90, L89, V266, K214, L481, L202, L259, L195, L150, R85, Y151, Y482, S488, V45, L483, S80, K196, for example one or more of the following amino acid changes:

[0008] L195F, K284E, K10R, S143N, L502M, L4031, A387S, S86K, F90H, L94M, K196E, L19M, K214E, K373E, L259F, K511E, L159M, R479Q, L483M, I82V, F90Y, L89I, V266I, K214E, L481I, L202M, L259V, L195I, L150M, R85K, Y151F, Y482F, S488T, V45I, L483M, S80T, K196T.

[0009] In a first aspect, the invention provides an isolated nucleic acid sequence encoding the yeast NDI1 protein of SEQ ID NO: 542 or a functional variant thereof having at least 90% sequence identity with SEQ ID NO: 542, wherein the nucleic acid comprises at least 50 codons which are codon optimised compared with the sequence of yeast NDI1 gene of SEQ ID NO: 1.

[0010] Examples of codon optimised variants of yeast NDI1 gene are provided in SEQ ID NO'S: 2-62, 75-145, 165-243, 264-341, 362-441, 462-541, and 705-1004.

[0011] In a second aspect, the invention provides an isolated codon optimised nucleic acid sequence encoding an immune optimised functional variant of the yeast NDI1 protein of SEQ ID NO: 542 comprising at least one conservative amino acid change at a residue selected from the group consisting of:

[0012] L195, K284, K10, S143, L502, L403, A387, S86, F90, L94, K196, L19, K214, K373, L259, K511, L159, R479, L483, I82, F90, L89, V266, K214, L481, L202, L259, L195, L150, R85, Y151, Y482, S488, V45, L483, S80, K196, for example one or more of the following amino acid changes:

[0013] L195F, K284E, K10R, S143N, L502M, L4031, A387S, S86K, F90H, L94M, K196E, L19M, K214E, K373E, L259F, K511E, L159M, R479Q, L483M, I82V, F90Y, L89I, V266I, K214E, L481I, L202M, L259V, L195I, L150M, R85K, Y151F, Y482F, S488T, V45I, L483M, S80T, K196T, wherein the nucleic acid comprises at least 50 codons which are codon optimised compared with the sequence of wild-type yeast NDI1 gene of SEQ ID NO: 1.

[0014] Examples of immune and codon optimised variants of yeast NDI1 gene are provided in SEQ ID NO'S: 75-145, 165-243, 264-341, 362-441, 462-541, 566-584, 705-824, 835-884, 895-944 and 955-1004.

[0015] In a third aspect, the invention provides an isolated nucleic acid sequence encoding an immune optimised functional variant of yeast NDI1 protein of SEQ ID NO: 542 in which the variant comprises at least one conservative amino acid change at a residue selected from the group consisting of:

[0016] L195, K284, K10, S143, L502, L403, A387, S86, F90, L94, K196, L19, K214, K373, L259, K511, L159, R479, L483, 182, F90, L89, V266, K214, L481, L202, L259, L195, L150, R85, Y151, Y482, S488, V45, L483, S80, K196, for example one or more of the following amino acid changes:

[0017] L195F, K284E, K10R, S143N, L502M, L4031, A387S, S86K, F90H, L94M, K196E, L19M, K214E, K373E, L259F, K511E, L159M, R479Q, L483M, I82V, F90Y, L89I, V266I, K214E, L481I, L202M, L259V, L195I, L150M, R85K, Y151F, Y482F, S488T, V45I, L483M, S80T, K196T,

[0018] In an additional aspect of the invention the NDI1 gene and encoded protein are immune optimized employing amino acid substitution(s) at one or more key NDI1 positions as defined by K10, L19, V45, S80, I82, R85, S86, L89, F90, L94, S143, L150, Y151, L159, L195, K196, L202, K214, L259, V266, K284, K373, A387, L403, R479, L481, Y482, L483, S488, L502, K511.

[0019] Examples of immune optimised variants of yeast NDI1 gene (without codon optimisation) are provided in SEQ ID NO'S: 63-74 and 547-565 (one amino acid change), 146-164 and 585-605 (two amino acid changes), 244-263 and 606-640 (three amino acid changes), 641-675 (four amino acid changes), 342-361 and 676-696 (five amino acid changes), 697-703 (six amino acid changes), 704 (seven amino acid changes) and 442-461 (ten amino acid changes).

[0020] Typically, the nucleic acid sequence of the invention encodes a functional variant of the yeast NDI1 protein of SEQ ID NO: 542 having at last 90% sequence identity with SEQ ID NO:542. Preferably, the functional variant comprises at least 91%, 92%, 93%, 94%, 95%, 96%, 97%, 98% or 99% sequence identity with SEQ ID NO: 542.

[0021] Preferably, the nucleic acid sequence of the invention encodes a yeast NDI1 protein that includes at least 1, 2, 3, 4, 5, 6, 7, 8, 9, or 10 amino acid changes. Typically, from 1-20, 1-15, or ideally from 1-10, amino acids are changed. The changes are suitably conservative changes made to one or more of the residues identified above, for example one or more of: L195F, K284E, K10R, S143N, L502M, L4031, A387S, S86K, F90H, L94M, K196E, L19M, K214E, K373E, L259F, K511E, L159M, R479Q, L483M, I82V, F90Y, L89I, V266I, K214E, L481I, L202M, L259V, L195I, L150M, R85K, Y151F, Y482F, S488T, V45I, L483M, S80T, K196T.

[0022] Preferably, the nucleic acid sequence of the invention encodes a yeast NDI1 protein that includes at least 2, 3, 4, 5, 6, 7, 8, 9, or 10 amino acid changes. Typically, from 1-20, 1-15, or ideally from 1-10, amino acids are changed, and the changes are suitably selected at NDI1 positions from the group: K10, L19, V45, S80, I82, R85, S86, L89, F90, L94, S143, L150, Y151, L159, L195, K196, L202, K214, L259, V266, K284, K373, A387, L403, R479, L481, Y482, L483, S488, L502, K511.

[0023] Suitably, the variant protein includes at least 1, 2, 3, 4, 5, 6, 7, 8, 9, 10, 11, 12, 13, 14, 15, 16, 17, 18, or all of the amino acid changes selected from: L195F, K284E, K10R, S143N, L502M, L4031, A387S, S86K, F90H, L94M, K196E, L19M, K214E, K373E, L259F, K511E, L159M, R479Q, L483M, I82V, F90Y, L89I, V266I, K214E, L481I, L202M, L259V, L195I, L150M, R85K, Y151F, Y482F, S488T, V45I, L483M, S80T, K196T.

[0024] Ideally, the variant protein includes an amino acid change selected from: L195F, K284E, K10R, S143N, L502M, L4031, A387S, S86K, F90H, L94M, K196E, L19M, K214E, K373E, L259F, K511E, L159M, R479Q, L483M, I82V, F90Y, L89I, V266I, K214E, L481I, L202M, L259V, L195I, L150M, R85K, Y151F, Y482F, S488T, V45I, L483M, S80T, K196T.

[0025] Preferably, at least 90, 100, 150, 200, 250, 300, 320, or 329 codons are codon optimised for use in a mammal. In one embodiment, 1-100, 100-200, 200-300, or 300-329 codons are optimised. Ideally, 329 codons are optimised (see SEQ ID NO's 62, 134-145, 225-243, 324-341, 422-441, 522-541, 566-584 and 705-824).

[0026] In another embodiment 1-100, 100-200, 200-300, or 300-329 NDI1 codons are optimised for use in mammals and the nucleic acid sequence encodes a yeast NDI1 protein that includes at least 1, 2, 3, 4, 5, 6, 7, 8, 9, or 10 amino acid changes. Typically, from 1-20, 1-15, or ideally from 1-10, amino acids are changed, and the changes are suitably selected at NDI1 positions from the group: K10, L19, V45, S80, I82, R85, S86, L89, F90, L94, S143, L150, Y151, L159, L195, K196, L202, K214, L259, V266, K284, K373, A387, L403, R479, L481, Y482, L483, S488, L502, K511.

[0027] Preferably, the nucleic acid of the invention encodes a variant protein having at least 91%, 92%, 93%, 94%, 95%, 96%, 97%, 98% or 99% sequence identity with SEQ ID NO: 542.

[0028] The invention also relates to a nucleic acid construct comprising a nucleic acid sequence of the invention and a nucleic acid sequence encoding a mitochondrial localisation sequence. This may be, but are not limited to, sequences such as MLSKNLYSNKRLLTSTNTLVRFASTRS (SEQ ID NO: 1006) or MSVLTPLLLRGLTGSARRLPVPRAKIHSL (SEQ ID NO: 1007).

[0029] The invention also relates to a nucleic acid construct encoding a protein of the invention. The nucleic acid may be a DNA or RNA nucleic acid. The nucleic acid of the invention may use modified nucleic acids to optimise delivery and or increase stability and or increase longevity and or reduce immunogenicity 22,23.

[0030] In one aspect the invention relates to delivery of RNA encoding the protein and or protein variants of the invention.

[0031] The invention also relates to a protein encoded by a nucleic acid construct of the invention.

[0032] The term “nucleic acid sequence of the invention” as employed hereafter should be understood to mean either or both of the nucleic acid sequences of the invention and the nucleic acid constructs of the invention.

[0033] The invention also relates to a nucleic acid sequence selected from SEQ ID NO's: 1-541 and 547-1004.

[0034] The invention also relates to a protein encoded by a nucleic acid sequence of the invention. The protein may also include one or more mitochondrial localisation signal(s). This may be but not limited to sequences such as MLSKNLYSNKRLLTSTNTLVRFASTRS (SEQ ID NO: 1006) or MSVLTPLLLRGLTGSARRLPVPRAKIHSL (SEQ ID NO: 1007).

[0035] The invention also relates to a vector suitable for use in gene therapy and comprising a nucleic acid sequence of the invention. Suitably the vector is a viral vector, typically an adeno-associated virus (AAV), preferably AAV virus serotype 2, although other AAV serotypes and other types of vectors may be employed such as for example other viral vectors, non-viral vectors, naked DNA and other vectors, examples of which are listed in Table 5. Typically, the nucleic acid of the invention is expressed singly from the vector (single delivery vehicle). In another embodiment, the nucleic acid of the invention is expressed together with another gene either from the single delivery vehicle or using two delivery vechicles, for example, a gene that enhances cell survival and or cell function such as a neurotrophic factor, a growth factor, an anti-apoptotic agent, an antioxidant, a cytokine, a hormone or others, examples of which are described in Table 6. Genes may be delivered at the same time and/or before and/or after each other. Ideally, the second gene is a neurotrophic factor, examples of which are described in Table 6.

[0036] The invention also relates to a kit comprising a vector of the invention in combination with a second vector comprising a gene that enhances cell survival and or cell function such as a neurotrophic factor, a growth factor, an anti-apoptotic agent, an antioxidant, a cytokine, a hormone or others, examples of which are described in Table 6. Ideally, the second vector comprises a gene encoding a neurotrophic factor.

[0037] In an additional aspect additional gene sequences may be expressed in the same vector as the nucleic acid of the invention from a component such as an internal ribosome entry site (IRES) and or may be expressed using two or multiple promoter sequences.

[0038] Typically, the vector of the invention comprises a promotor wherein the nucleic acid of the invention is expressed from the promotor. Preferably, the promotor is one that is preferentially or specifically expressed in retinal ganglion cells (RGC's) wherein expression of the nucleic acid of the invention is under the control of the promotor. Examples of such promotors are described in Table 4. In an alternative embodiment, the vector of the invention comprises a promotor known to be expressed at low levels in RGC's.

[0039] In a further embodiment, the promotor is one that is known to be expressed in multiple cell types, examples of which are described in Table 4.

[0040] In an additional aspect, the nucleic acid of the invention is expressed from an inducible and/or conditional promotor.

[0041] In a further embodiment, the promotor is a tissue specific and/or cell specific promotor targeting mammalian cells other than RGC's such as the rhodopsin promotor which expresses in rod photoreceptor cells. Suitably, the vector comprises tissue specific and/or cell specific promotors combined with an inducible promotor system to control expression of the nucleic acid.

[0042] The promotors may control expression of the nucleic acid of the invention in combination with additional genes, as described above. Alternatively, the vector may comprise different promotors for expressing the nucleic acid of the invention and the other genes, for example, a gene encoding a neurotrophic agent.

[0043] The invention also relates to a method for the treatment and/or prevention of a neurodegenerative disease, especially LHON, which method comprises a step of delivering a nucleic acid of the invention to an individual by means of intraocular, ideally intravitreal, delivery. In one aspect a nucleic acid of the invention is delivered to an individual by means of systemic administration.

[0044] Preferably, the step of delivering the nucleic acid of the invention involves delivering a vector of the invention to the individual.

[0045] The invention also relates to the use of a nucleic acid of the invention, or a protein encoded by a nucleic acid of the invention, or a vector of the invention, as a medicament.

[0046] The invention also relates to a nucleic acid sequence of the invention, or a protein encoded by a nucleic acid sequence of the invention, or a vector of the invention, for use in the treatment of a disease or condition associated with mitochondrial dysfunction, for example a neurodegenerative disease, especially Leber Hereditory Optic Neuropathy (LHON). Typically, the treatment is symptomatic or prophylactic treatment.

[0047] The invention also relates to a method of treating a disease, for example a disease associated with mitochondrial dysfunction, for example a neurodegenerative disease, in an individual comprising a step of administering an active agent to the individual, typically administering the active agent to the eye, ideally to the retinal ganglion cells, photoreceptor cells or other eye cells, in which the active agent includes a nucleic acid sequence of the invention, a protein encoded by the nucleic acid sequence of the invention, or a vector of the invention. The treatment may be symptomatic or prophylactic treatment.

[0048] Typically, the active agent is administered by intra-ocular, ideally intra-vitreal and/or subretinal, administration. The active agent may include an additional agent, for example a gene or protein or compounds that enhances cell survival and or cell function such as a neurotrophic factor, a growth factor, an anti-apoptotic agent, an antioxidant, a cytokine, a hormone or others, examples of which are described in Table 6. The active agent and the additional agent, for example an additional gene, may be delivered at the same time or before or after each other.

[0049] Ideally, the additional agent is a gene encoding a neurotrophic factor, examples of which are described in Table 6. The active agent may be delivered by means of a vector, or by means of separate vectors, or by direct delivery of the additional agent. The active agent may be delivered to other parts of the body involving mitochondrial dysfunction, for example, to the brain for the treatment of neurodegenerative diseases such as Alzheimer's disease, Parkinson's disease or dementia, or to photoreceptor cells for the treatment of Retinitis Pigmentosa or Age-related macular degeneration, or to muscle cells to treat muscle weakness and/or degeneration.

[0050] Further, the nucleic acid sequence of the invention, its protein product, or a vector of the invention, may be delivered to the target cell or tissue at the same time or at a different time to the additional agent.

[0051] The invention also relates to a cell, for example a stem cell or progenitor cell, RGC or RGC precursor cell that is transformed with a nucleic acid of the invention. Cells of the invention may be delivered to the eye via subretinal and/or intravitreal injection to treat cells of the eye affected by mitochondrial dysfunction such as RGC dysfunction. Alternatively, cells of the invention may be delivered to other parts of the body involving mitochondrial dysfunction, for example to the brain for the treatment of neurodegenerative diseases such as Alzheimer disease, Parkinsons disease or dementia, or to photoreceptor cells for the treatment of Retinitis Pigmentosa or Age-related macular degeneration, or to muscle cells to treat muscle weakness and/or degeneration.

[0052] Thus, the invention also relates to a transformed cell of the invention for use as a medicament. The invention also relates to a method of treating a disease or condition involving mitochondrial dysfunction, typically a neurodegenerative disease, suitably LHON, comprising a step of delivering cells of the invention to the individual.

[0053] The invention also provides a pharmaceutical formulation comprising an active agent selected from a nucleic acid of the invention, a protein encoded by the nucleic acid of the invention, a vector of the invention, or a cell of the invention, in combination with a pharmaceutically acceptable carrier.

[0054] Suitably, the formulation is provided in the form of a slow release capsule adapted to release the active agent following subretinal and or intravitreal injection, or following delivery to or close to a target tissue type/cell type (see examples in Table 7).

[0055] In an additional embodiment encapsulated cell technology is employed for delivery of the therapy.

[0056] In one embodiment the invention provides a transgenic organ, or a transgenic non-human animal, comprising the nucleic acids and vectors of the invention.

[0057] In another embodiment the invention may be delivered to cells with mutations in the nuclear genome which lead to disease phenotypes which are similar to disease phenotypes related to mitochondrial mutations. For example the disease phenotypes described in Table 8 may all result from nuclear mutations or mitochondrial mutations and hence may benefit from the invention. The invention would need to be delivered to the appropriate affected cell or tissue type. Typically these nuclear mutations affect cell types that require high levels of energy such as neurons and muscle cells. Hence these disorders, resulting from mutations in the nuclear genome and affecting these high energy requiring cell types may also benefit from additional energy provided by the invention.

[0058] In a further aspect, the invention relates to a method for the treatment or prevention of a neurodegenerative disease, especially LHON, which method comprises a step of delivering a yeast NDI1 gene, or a variant thereof such as a nucleic acid of the invention, to an individual by means of intraocular delivery, ideally intravitreal and/or subretinal delivery.

[0059] In a yet further aspect, the invention relates to a method for the treatment or prevention of a neurodegenerative disease, especially LHON, which method comprises a step of delivering a yeast NDI1 gene, or a variant thereof such as a nucleic acid of the invention, and an agent that enhances cell survival and or cell function such as a neurotrophic factor, a growth factor, an anti-apoptotic agent, an antioxidant, a cytokine, a hormone or others (examples of which are described in Table 6) to an individual. Treatment may be symptomatic or prophylactic.

[0060] In a yet further aspect, the invention relates to a method for the treatment or prevention of a neurodegenerative disease, especially LHON, which method comprises a step of delivering a yeast NDI1 gene, or a variant thereof such as a nucleic acid of the invention using an AAV vector, and delivery of an agent, using the same or a separate AAV vector, that enhances cell survival and or cell function such as a neurotrophic factor, a growth factor, an anti-apoptotic agent, an antioxidant, a cytokine, a hormone or others (examples of which are described in Table 6) to an individual. Treatment may be symptomatic or prophylactic.

[0061] The term “yeast NDI1 gene” refers to the wild-type Saccharomyces cerviscae NDI1 gene shown in SEQ ID NO: 1.

[0062] The term “variant of yeast NDI1 gene” means a variant of yeast NDI1 gene which differs from the wild-type gene due to at least codon optimisation, immune optimisation, or both.

[0063] The term “conservative amino acid change” should to be understood to mean that the amino acid being introduced is similar structurally, chemically, or functionally to that being substituted. In particular, it refers to the substitution of an amino acid of a particular grouping as defined by its side chain with a different amino acid from the same grouping.

[0064] The term nucleic acid means deoxyribonucleic acid (DNA), ribonucleic acid (RNA), and artificial nucleic acid analogs such as peptide nucleic acid (PNA), morpholino- and locked nucleic acid, glycol nucleic acid and threose nucleic acid. Artificial nucleic acid analogs differ from DNA and RNA as they typically contain changes to the backbone of the molecule. Nucleic acids incorporating chemical modification(s) to DNA and RNA to optimise delivery and or increase stability and or increase longevity and or reduce immunogenicity are also contemplated by the term nucleic acid. Modifications, such as phosphorothioates, boranophosphate, 2′-Amino, 2′-Fluoro, 2′-Methoxy have been made to nucleic acids to modulate parameters such as resistance to nuclease degradation, binding affinity and or uptake. Exemplary nucleic acid molecules for use are phosphoramidate, phosphothioate and methylphosphonate analogs of DNA and or RNA. Modifications include but are not limited to inclusion of 5-fluorouracil, 5-bromouracil, 5-chlorouracil, 5-iodouracil, hypoxanthine, xantine, 4-acetylcytosine, 5-(carboxyhydroxylmethyl)uracil, 5-carboxymethylaminomethyl-2-thiouridine, 5-carboxymethylaminomethyluracil, dihydrouracil, beta-D-galactosylqueosine, inosine, N6-isopentenyladenine, 1-methylguanine, 1-methylinosine, 2,2-dimethylguanine, 2-methyladenine, 2-methylguanine, 3-methylcytosine, 5-methylcytosine, N6-adenine, 7-methylguanine, 5-methylaminomethyluracil, 5-methoxyaminomethyl-2-thiouracil, beta-D-mannosylqueosine, 5′-methoxycarboxymethyluracil, 5-methoxyuracil, 2-methylthio-N6-isopentenyladenine, uracil-5-oxyacetic acid (v), wybutoxosine, pseudouracil, queosine, 2-thiocytosine, 2′-O-methyl, 5-methyl-2-thiouracil, 2-thiouracil, 4-thiouracil, 5-methyluracil, uracil-5-oxyacetic acid methylester, uracil-5-oxyacetic acid (v), -5-methyl-2-thiouracil, 3-(3-amino-3-N-2-carboxypropyl)uracil, (acp3)w, and 2,6-diaminopurine, 2-thiourdine, 5-methyl-cytidine amongst others.

[0065] The term “codon optimised” means that a codon that expresses a bias for yeast (i.e. is common in yeast genes but uncommon in mammalian genes) is changed to a synonomous codon (a codon that codes for the same amino acid) that expresses a bias for mammals. Thus, the change in codon does not result in any amino acid change in the encoded protein.

[0066] The term “immune optimised” as applied to a variant of yeast NDI1 gene means that the gene variant encodes a variant NDI1 protein which elicits a reduced immune response when expressed in a mammal compared to the wild-type yeast NDI1 gene.

[0067] The term “yeast NDI1 protein” should be understood to mean the wild-type Saccharomyces cerviscae NDI1 protein shown in SEQ ID NO: 542. The “functional variant” should be understood to mean a variant of SEQ ID NO: 542 which retains the functionality of yeast NDI1 protein, for example, comparable oxygen consumption measurements in the presence of rotenone (see methods below/FIG. 2). Typically, the functional variants of yeast NDI1 protein will have at least 90%, 91%, 92%, 93%, 94%, 95%, 96%, 97%, 98% or 99% sequence identity with SEQ ID NO: 542. In this context, a polypeptide sequence that shares 90% amino acid identity with SEQ ID NO: 542 is one in which any 90% of aligned residues are either identical to, or conservative substitutions of, the corresponding residues in SEQ ID NO: 542. The “percent sequence identity” of two amino acid sequences is determined using the algorithm of Karlin and Altschul Proc. Natl. Acad. Sci. USA 87:2264-68, 1990, modified as in Karlin and Altschul Proc. Natl. Acad. Sci. USA 90:5873-77, 1993. Such an algorithm is incorporated into the NBLAST and XBLAST programs (version 2.0) of Altschul, et al. J. Mol. Biol. 215:403-10, 1990. BLAST protein searches can be performed with the XBLAST program, score=50, wordlength=3 to obtain amino acid sequences homologous to the protein molecules of the invention. Where gaps exist between two sequences, Gapped BLAST can be utilized as described in Altschul et al., Nucleic Acids Res. 25(17):3389-3402, 1997. When utilizing BLAST and Gapped BLAST programs, the default parameters of the respective programs (e.g., XBLAST and NBLAST) can be used.

[0068] The term “neurodegenerative disease” should be understood to mean a disease characterised by neuronal injury or death, or axonal degeneration, and includes diseases such as motor neuron disease; prion disease; Huntington's disease; Parkinson's disease; Parkinson's plus; Tauopathies; Chromosome 17 dementias; Alzheimer's disease; Multiple sclerosis (MS); hereditary and acquired neuropathies; retinopathies and diseases involving cerebellar degeneration.

[0069] In the context of the present invention, the term “gene therapy” refers to treatment of individual which involves insertion of a gene into an individual's cells for the purpose of preventing or treating disease. Insertion of the gene is generally achieved using a delivery vehicle, also known as a vector. Viral and non-viral vectors may be employed to deliver a gene to a patients' cells. Other types of vectors suitable for use in gene therapy are described below.

[0070] The term “neurotrophic agent” should be understood to mean a protein that induces the survival, development and function of neurons. Examples include nerve growth factor (NGF) and brain-derived neurotrophic factor (BDNF). Other examples are provided below.

[0071] Retinal ganglion cells (RGCs) are types of neurons located close to the inner surface (the retinal ganglion layer) of the retina of the eye. They collectively image forming and non-image forming visual information from the retina to several regions in the thalamus, hypothalamus, and mid-brain.

[0072] It will be appreciated that the nucleci acids of the invention may include one or more polyadenylation signals, typically located at the 3′-end of the molecule. In addition, the nucleic acid may include a leader sequence and/or a stop codon. It will also be appreciated that the nucleci acids of the invention may include one or more signals to facilitate import of proteins into mitochondria.

[0073] Proteins and polypeptides (including variants and fragments thereof) of and for use in the invention may be generated wholly or partly by chemical synthesis or by expression from nucleic acid. The proteins and peptides of and for use in the present invention can be readily prepared according to well-established, standard liquid or, preferably, solid-phase peptide synthesis methods known in the art (see, for example, J. M. Stewart and J. D. Young, Solid Phase Peptide Synthesis, 2nd edition, Pierce Chemical Company, Rockford, Ill. (1984), in M. Bodanzsky and A. Bodanzsky, The Practice of Peptide Synthesis, Springer Verlag, New York (1984).

[0074] Apart from the specific delivery systems embodied below, various delivery systems are known and can be used to administer the therapeutic of the invention, e.g., encapsulation in liposomes, microparticles, microcapsules, recombinant cells capable of expressing the Therapeutic, receptor-mediated endocytosis (see, e.g., Wu and Wu, 1987, J. Biol. Chem. 262:4429-4432), construction of a therapeutic nucleic acid as part of a retroviral or other vector, etc. Methods of introduction include but are not limited to intradermal, intramuscular, intraperitoneal, intraocular, intravenous, subcutaneous, intranasal, epidural, and oral routes. The compounds may be administered by any convenient route, for example by infusion or bolus injection, by absorption through epithelial or mucocutaneous linings (e.g., oral mucosa, rectal and intestinal mucosa, etc.) and may be administered together with other biologically active agents. Administration can be systemic or local. In addition, it may be desirable to introduce the pharmaceutical compositions of the invention into the central nervous system by any suitable route, including intraventricular and intrathecal injection; intraventricular injection may be facilitated by an intraventricular catheter, for example, attached to a reservoir, such as an Ommaya reservoir. Pulmonary administration can also be employed, e.g., by use of an inhaler or nebulizer, and formulation with an aerosolizing agent. In addition, naked DNA can be used for delivery.

[0075] In one aspect of the invention, agents such as surfactants may be included in formulations to minimize aggregation of the therapeutic of the invention, whether viral and/or non-viral vectors, proteins or polypeptides and/or cells.

[0076] In a specific embodiment, it may be desirable to administer the pharmaceutical compositions of the invention locally to the area in need of treatment; this may be achieved, for example, by means of an implant, said implant being of a porous, non-porous, or gelatinous material, including membranes, such as sialastic membranes, or fibers.

[0077] In another embodiment, the therapeutic can be delivered in a vesicle, in particular a liposome (see Langer, Science 249:1527-1533 (1990); Treat et al., in Liposomes in the Therapy of Infectious Disease and Cancer, Lopez-Berestein and Fidler (eds.), Liss, New York, pp. 353-365 (1989); Lopez-Berestein, ibid., pp. 317-327; see generally ibid.)

[0078] In yet another embodiment, the therapeutic can be delivered in a controlled release system. In one embodiment, a pump may be used (see Langer, supra; Sefton, CRC Crit. Ref. Biomed., Eng. 14:201 (1987); Buchwald et al., Surgery 88:75 (1980); Saudek et al., N. Engl. J. Med. 321:574 (1989)). In another embodiment, polymeric materials can be used (see Medical Applications of Controlled Release, Langer and Wise (eds.), CRC Pres., Boca Raton, Fla. (1974); Controlled Drug Bioavailability, Drug Product Design and Performance, Smolen and Ball (eds.), Wiley, New York (1984); Ranger and Peppas, J. Macromol. Sci. Rev. Macromol. Chem. 23:61 (1983); see also Levy et al., Science 228:190 (1985); During et al., Ann. Neurol. 25:351 (1989); Howard et al., J. Neurosurg. 71:105 (1989)). In yet another embodiment, a controlled release system can be placed in proximity of the therapeutic target, thus requiring only a fraction of the systemic dose (see, e.g., Goodson, in Medical Applications of Controlled Release, supra, vol. 2, pp. 115-138 (1984)). Other controlled release systems are discussed in the review by Langer (Science 249:1527-1533 (1990)).

[0079] The present invention also provides pharmaceutical compositions comprising a nucleic acid of the invention and/or a protein encoded by the nucleic acid. Such compositions comprise a therapeutically effective amount of the therapeutic, and a pharmaceutically acceptable carrier. In a specific embodiment, the term “pharmaceutically acceptable” means approved by a regulatory agency of the Federal or a state government or listed in the U.S. Pharmacopeia or other generally recognized pharmacopeia for use in animals, and humans. The term “carrier” refers to a diluent, adjuvant, excipient, or vehicle with which the therapeutic is administered. Such pharmaceutical carriers can be sterile liquids, such as water and oils, including those of petroleum, animal, vegetable or synthetic origin, such as peanut oil, soybean oil, mineral oil, sesame oil and the like. Water is a preferred carrier when the pharmaceutical composition is administered intravenously. Saline solutions and aqueous dextrose and glycerol solutions can also be employed as liquid carriers, particularly for injectable solutions. Suitable pharmaceutical excipients include starch, glucose, lactose, sucrose, gelatin, malt, rice, flour, chalk, silica gel, sodium stearate, glycerol monostearate, talc, sodium chloride, dried skim milk, glycerol, propylene glycol, water, ethanol and the like.

[0080] The composition, if desired, can also contain minor amounts of wetting or emulsifying agents, or pH buffering agents. These compositions can take the form of solutions, suspensions, emulsion, tablets, pills, capsules, powders, sustained-release formulations and the like. The composition can be formulated as a suppository, with traditional binders and carriers such as triglycerides. Oral formulation can include standard carriers such as pharmaceutical grades of mannitol, lactose, starch, magnesium stearate, sodium saccharine, cellulose, magnesium carbonate, etc. Examples of suitable pharmaceutical carriers are described in “Remington's Pharmaceutical Sciences” by E. W. Martin. Such compositions will contain a therapeutically effective amount of the therapeutic, preferably in purified form, together with a suitable amount of carrier so as to provide the form for proper administration to the patient.

[0081] In a preferred embodiment, the composition is formulated in accordance with routine procedures as a pharmaceutical composition adapted for intravenous administration to human beings. Typically, compositions for intravenous administration are solutions in sterile isotonic aqueous buffer. Where necessary, the composition may also include a solubilizing agent and a local anesthetic such as lignocaine to, ease pain at the, site of the injection. Generally, the ingredients are supplied either separately or mixed together in unit dosage form, for example, as a dry lyophilized powder or water free concentrate in a hermetically sealed container such as an ampoule or sachette indicating the quantity of active agent. Where the composition is to be administered by infusion, it can be dispensed with an infusion bottle containing sterile pharmaceutical grade water or saline. Where the composition is administered by injection, an ampoule of sterile water for injection or saline can be provided so that the ingredients may be mixed prior to administration.

[0082] The amount of the therapeutic of the invention which will be effective in the treatment of a particular disorder or condition will depend on the nature of the disorder or condition, and can be determined by standard clinical techniques. In addition, in vivo and/or in vitro assays may optionally be employed to help predict optimal dosage ranges. The precise dose to be employed in the formulation will also depend on the route of administration, and the seriousness of the disease or disorder, and should be decided according to the judgment of the practitioner and each patient's circumstances.

### Nucleic Acid Sequences of the Invention

[0083] The sequence listing below provides a number of nucleic acid sequences according to the invention, specifically:

[0084] SEQ ID NO: 1—Yeast NDI1 gene—0 amino acid changes—0 codon changes

[0085] SEQ ID NO'S 2-21 and 825-834—Yeast NDI1 gene—0 amino acid changes—100 codon changes

[0086] SEQ ID NO'S 22-41 and 885-894—Yeast NDI1 gene—0 amino acid changes—200 codon changes

[0087] SEQ ID NO'S 42-61 and 945-954—Yeast NDI1 gene—0 amino acid changes—300 codon changes

[0088] SEQ ID NO 62—Yeast NDI1 gene—0 amino acid changes—329 codon changes

[0089] SEQ ID NO'S 63-74 and 547-565—Yeast NDI1 gene—1 amino acid changes—0 codon changes

[0090] SEQ ID NO'S 75-94 and 835-844—Yeast NDI1 gene—1 amino acid changes—100 codon changes

[0091] SEQ ID NO'S 95-114 and 895-904—Yeast NDI1 gene—1 amino acid changes—200 codon changes

[0092] SEQ ID NO'S 115-134 and 955-964—Yeast NDI1 gene—1 amino acid changes—300 codon changes

[0093] SEQ ID NO'S 134-145 and 566-584—Yeast NDI1 gene—1 amino acid changes—329 codon changes

[0094] SEQ ID NO'S 146-164 and 585-605—Yeast NDI1 gene—2 amino acid changes—0 codon changes

[0095] SEQ ID NO'S 165-184 and 845-854—Yeast NDI1 gene—2 amino acid changes—100 codon changes

[0096] SEQ ID NO'S 185-204 and 905-914—Yeast NDI1 gene—2 amino acid changes—200 codon changes

[0097] SEQ ID NO'S 205-224 and 965-974—Yeast NDI1 gene—2 amino acid changes—300 codon changes

[0098] SEQ ID NO'S 225-243 and 705-725—Yeast NDI1 gene—2 amino acid changes—329 codon changes

[0099] SEQ ID NO'S 244-263 and 606-640—Yeast NDI1 gene—3 amino acid changes—0 codon changes

[0100] SEQ ID NO'S 264-283 and 855-864—Yeast NDI1 gene—3 amino acid changes—100 codon changes

[0101] SEQ ID NO'S 284-303 and 915-924—Yeast NDI1 gene—3 amino acid changes—200 codon changes

[0102] SEQ ID NO'S 304-323 and 975-984—Yeast NDI1 gene—3 amino acid changes—300 codon changes

[0103] SEQ ID NO'S 324-341 and 726-760—Yeast NDI1 gene—3 amino acid changes—329 codon changes

[0104] SEQ ID NO'S 641-675—Yeast NDI1 gene—4 amino acid changes—0 codon changes

[0105] SEQ ID NO'S 865-874—Yeast NDI1 gene—4 amino acid changes—100 codon changes

[0106] SEQ ID NO'S 925-934—Yeast NDI1 gene—4 amino acid changes—200 codon changes

[0107] SEQ ID NO'S 985-994—Yeast NDI1 gene—4 amino acid changes—300 codon changes

[0108] SEQ ID NO'S 761-795—Yeast NDI1 gene—4 amino acid changes—329 codon changes

[0109] SEQ ID NO'S 342-361 and 676-696—Yeast NDI1 gene—5 amino acid changes—0 codon changes

[0110] SEQ ID NO'S 362-381 and 875-884—Yeast NDI1 gene—5 amino acid changes—100 codon changes

[0111] SEQ ID NO'S 382-401 and 935-944—Yeast NDI1 gene—5 amino acid changes—200 codon changes

[0112] SEQ ID NO'S 402-421 and 995-1004—Yeast NDI1 gene—5 amino acid changes—300 codon changes

[0113] SEQ ID NO'S 422-441 and 796-816—Yeast NDI1 gene—5 amino acid changes—329 codon changes

[0114] SEQ ID NO'S 697-703—Yeast NDI1 gene—6 amino acid changes—0 codon changes

[0115] SEQ ID NO'S 817-823—Yeast NDI1 gene—6 amino acid changes—329 codon changes

[0116] SEQ ID NO 704—Yeast NDI1 gene—7 amino acid changes—0 codon changes SEQ ID NO 824—Yeast NDI1 gene—7 amino acid changes—329 codon changes

[0117] SEQ ID NO'S 442-461—Yeast NDI1 gene—10 amino acid changes—0 codon changes

[0118] SEQ ID NO'S 462-481—Yeast NDI1 gene—10 amino acid changes—100 codon changes

[0119] SEQ ID NO'S 482-501—Yeast NDI1 gene—10 amino acid changes—200 codon changes

[0120] SEQ ID NO'S 502-521—Yeast NDI1 gene—10 amino acid changes—300 codon changes

[0121] SEQ ID NO'S 522-541—Yeast NDI1 gene—10 amino acid changes—329 codon changes

[0122] SEQ ID NO: 542—Yeast NDI1 protein—0 amino acid changes

### BRIEF DESCRIPTION OF THE FIGURES

[0123] FIG. 1. Diagrammatic representation of the core construct designs. A: OphNDI1; OphNDI1 (yeast NDI1 gene which has been codon optimized and/or immune optimized) was expressed from the CMV (cytomegalovirus) immediate early promoter. A minimal polyadenylation signal was located at the 3′ end of the NDI1 gene. B: AAV-GDNF; GDNF (glial cell line derived neurotrophic factor) was expressed from the short ubiquitin promoter. The neurturin polyadenylation signal was located at the 3′ end of the GDNF gene. C: AAV-OphNDI1_GDNF; OphNDI1 was expressed from the CMV immediate early promoter. A minimal polyadenylation signal was located at the 3′ end of the NDI1 gene. 3′ to this GDNF was expressed from the short ubiquitin promoter. The neurturin polyadenylation signal was located at the 3′ end of the GDNF gene. D: OphNdiI expressed from a CMV promoter with a 3′ minimal polyadenylation signal. In this construct GDNF is expressed from an IRES and also contains the neurturin Polyadenylation signal.

[0124] Notably OphNDI1 may contain 0-10 amino acid substitutions to modulate and immune response or 1-329 altered codons, which are expressed more frequently in mammalian cells than the wild type codons in NDI1 (Table 1a & 1b and Sequence Listing). In addition the CMV and ubiquitin promoters may be substituted for any of the promoters indicated in Tables 2-4 and the GDNF gene may be substituted for any gene indicated in Table 6. Sequences for these core construct designs are presented in Table 1a & 1b and the attached Sequence Listing. Notably, different polyadenalation signals may also be utilised in the constructs described.

[0125] FIG. 2. Localisation, function and mRNA expression of NDI1. Western blot analysis of mitochondrial protein isolated from pAAV-NDI1 transfected and untransfected (Ctrl) HeLa cells (A). Top panel shows NDI1 protein expression (56 KDa) and bottom panel shows VDAC1 protein expression (31 KDa, mitochondrial loading control; n=3). B. Bar chart represents oxygen consumption measurements from pAAV-NDI1 transfected (black columns) and pAAV-EGFP transfected (Ctrl, white columns) HeLa cells with (+) and without (no) 5 μmol rotenone (n=6). C. Bar chart represents percentage rotenone insensitive respiration in pAAV-NDI1 transfected (black columns) and pAAV-EGFP transfected (control, white columns) HeLa cells (n=6). D. Retinal NDI1 mRNA expression from adult wild type mice intravitreally injected with 3×10⁸ vp AAV-NDI1 or 3×10⁸ vp AAV-EGFP (Ctrl) and analysed by RT-PCR two weeks post-injection (n=6). Rot insensitive resp (%): Percentage rotenone insensitive respiration, w: water blank, M: size marker; KDa (A), by (D). Error bars represent SD values and *: p<0.001.

[0126] FIG. 3. Oxygen consumption measurements from NDI1 transfected HeLa cells. Oxygen consumption measurements from HeLa cells transfected with pAAV-NDI1 (A) and pAAV-EGFP (B) in the presence of 5 μmol rotenone. Oxygen consumption measurements from HeLa cells transfected with pAAV-NDI1 (C) and pAAV-EGFP (D) in the absence of rotenone (control).

[0127] FIG. 4a. Oxygraphs for NDI1 constructs. Traces showing oxygen concentration (blue line) and oxygen consumption (red line) in media treated with 5 μmol rotenone and untransfected HeLa cells (negative control, A), cells transfected with ophNDI1-I82V (B), containing codon-optimisation at 329 codons and the I82V substitution and cells transfected with NDI1-I82V (C). Representative graphs for each are presented. Similarly HeLa cells were transfected with V45I constructs either the codon optimised hNDI1-V45I construct (D) or the wild type NDI1 construct containing the V45I substitution (NDI1-V45I; E). In addition V266I constructs, both NDI1-V266I (F) and hNDI1-V266I (G) were evaluated. The NDI1-F90Y (H) and hNDI1-F90Y (I) construct was also tested in HeLa cells treated with rotenone.

[0128] FIG. 4b. Bar charts of the data sets measuring the change in oxygen consumption from the experiments in FIG. 4a are presented. A statistically significant retention in oxygen consumption was observed between cells transfected with either the NDI1 variant or the hNDI1 variant constructs with p values ranging from p<0.05 (*) to <0.01 (**). A significant difference was observed between the rotenone insensitive respiration achieved with I82V and V45I constructs versus that achieved with the F90Y construct (I82V versus F90Y p<0.02 and V45I versus Y90Y p<0.002). No significant differences were observed between NDI1 treated cells and cells treated with NDI1-I82V, hNDI1-I82V or V45I constructs. However F90Y transfected cells differed significantly compared to NDI1 transfected cells, the latter showing a better retention of oxygen consumption.

[0129] FIG. 5. Histology of NDI1 treated retinas following rotenone insult. Adult wild type mice were intravitreally injected into contralateral eyes with 3×10⁸ vp AAV-NDI1 (A) and 1×10⁸ vp AAV-EGFP, to facilitate localisation of transduced regions of the retinas, or 3×10⁸ vp AAV-EGFP (B) alone (n=4). Three weeks post-injection, 1.5 nmol of rotenone was administered intravitrally to both eyes. Three weeks post-rotenone treatment eyes were enucleated, fixed, cryosectioned (12 μm) and processed for immunocytochemistry using NeuN primary and Cy3-conjugated secondary antibodies. Nuclei were counterstained with DAPI. A and B: representative sections show NeuN labelling (red) and nuclear DAPI (blue) signals overlaid. OS: photoreceptor outer segments; ONL: outer nuclear layer; INL: inner nuclear layer; GCL: ganglion cell layer. Scale bar: 20 μm. C: Bar chart representing mean ganglion cell counts per 100 μm. Blue and white columns represent values corresponding to AAV-NDI1+rotenone (NDI1) and AAV-EGFP+rotenone (EGFP), respectively. Error bars represent SD values and ***: p<0.001.

[0130] FIG. 6. Ultra-structural analysis of NDI1 treated optic nerves following rotenone insult. Adult wild type mice were intravitrally injected into contralateral eyes with AAV-NDI1 (B) or AAV-EGFP (C and D) (n=3). Three weeks post-injection, 1.5 nmol of rotenone was administered intravitreally to both eyes. Three weeks later eyes were enucleated and optic nerves collected, post-fixed, processed and analysed by transmission electron microscopy. At low magnification electron dense structures (arrow heads, B and C) were less frequent in the AAV-NDI1+rotenone (B) treated samples compared to the AAV-EGFP+rotenone treated samples (C). AAV-EGFP+rotenone treated samples at higher magnification (D). These were not apparent in the untreated samples (A). E: Bar chart representing mean number of membrane debris. Black and white columns represent AAV-NDI1+rotenone (NDI1) and AAV-EGFP+rotenone (EGFP), respectively. F: Bar chart representing mean optic nerve diameter measurements. Optic nerves from identically injected mice were taken nine months post-rotenone treatment, fixed, cryosectioned (12 μm) and the thickness of the optic nerve measured using light microscopy. Black and white columns represent AAV-NDI1+rotenone (NDI1) and AAV-EGFP+rotenone (EGFP), respectively. Error bars represent SD values and **: p<0.01. Scale bars: 10 μm (A, B and C) and 2 μm (D).

[0131] FIG. 7. Functional analysis of AAV-NDI1 and AAV-NSG treated optic nerves following rotenone insult. Adult wild type mice were intravitreally injected into the right eye with AAV-NDI1 (n=10) or AAV-NSG (n=6). Three weeks later, AAV-NDI1 (n=10) or AAV-NSG (n=6) injected mice received 1.5 nmol rotenone in the right eye. A further group of adult wild type mice received either DMSO (vehicle control, n=16) or 1.5 nmol rotenone intravitreally injected into the right eye (n=16). Two weeks post rotenone, or DMSO, treatment each mouse was intravitreally injected with 40 μg manganese chloride and manganese enhanced magnetic resonance imaging (MEMRI) carried out 2 hrs later. Pseudo-coloured T1-weighted images: Signal enhancement of the mouse visual pathway in oblique sections (36°) from DMSO (A), rotenone alone (B), AAV-NDI1+rotenone (C) and AAV-NSG+rotenone (D) are presented. E: Bar chart representing mean lg signal intensities in the region of the optic chiasm calculated using Image J® software. a.u.: arbitrary unit. Error bars represent SD values and ** represent p<0.01.

[0132] FIG. 8. Analysis of spatial vision in NDI treated mice following rotenone insult. Adult wild type mice were intravitrally injected into contralateral eyes with 3×10⁹ vp AAV-NDI1 or 3×10⁹ vp AAV-EGFP. Three weeks post-injection, 1.5 nmol of rotenone was administered intravitreally to both eyes; control mice were not administered with rotenone. Three months post-rotenone treatment optokinetic responses were measured using a virtual optokinetic system. Bar chart represents the mean spatial frequency threshold established for each eye. Black and white columns represent values corresponding to AAV-NDI1+rotenone (NDI1) and AAV-EGFP+rotenone (EGFP), respectively in rotenone treated (+Rotenone) and control (No Rotenone) mice. Error bars represent SD values and ***: p<0.001.

[0133] FIG. 9a. A representative western blot of proteins extracted from HeLa cells transiently transfected with plasmids expressing OphNDI1 and NDI1. A polyclonal antibody for Ndi1 was used to detect OphNDI1 and Ndi1 protein expressed in transfected cells. Lane 1; Ndi1 protein expressed from the original wild type NDI1 construct, Lane 2; Ndi1 with a C-terminal HA tag, Lane 3; Ndi1 protein expressed from OphNDI1, a humanized NDI1 construct with 329 optimised codons, Lane 4; Ndi1 protein expressed from OphNDI1-HA, a humanized Ndi1 with a HA tag. Lane 5; untransfected HeLa cells.

[0134] FIG. 9b: Bar chart showing normalized expression of humanized and wild-type Ndi1 protein as measured by western blot. HeLa cells were transfected with humanized and wild-type Ndi1. Cells were harvested 48 hours post-transfection and protein was extracted and western blotted using a polyclonal anti-Ndi1 primary antibody. Four independent blots were performed and images were captured and analysed with ImageJ® software to measure relative expression. For each blot, the relative expression level of wild-type Ndi1 was taken as a reference and the expression level of humanized Ndi1 was directly compared to it. Paired t-test performed on the non-normalized values indicate that humanized Ndi1 expresses significantly more highly than wild-typeNdI1 (P<0.005). a.u.:arbitrary unit

[0135] FIG. 10. Expression from AAV vectors expressing variants of NDI1 AAV vectors were intravitreally injected into wild type mice. AAV vectors contained unmodified NDI1, NSG (expressing both unmodified NDI1 and a GDNF gene), modified NDI1 with a V266I modification, humanised NDI1 (hNDI1), or hNDI1 with a I82V modification. Two weeks post-injection retinas were harvested and total RNA extracted. Real time RT PCRs were performed on RNA samples using primers NDI1F and NDI1R and hNDI1F and hNDI1 R.

[0136] A, Levels of NDI1 expressed from unmodified vector (NDI1) and from NSG, which expresses both an unmodified NDI1 gene and a GDNF gene, were compared by real time RT-PCR. Levels of expression (y-axis) are expressed in copy number per unit of the housekeeping gene, β-actin.

[0137] B, Levels of humanised NDI1 (hNDI1) expressed in mouse retina delivered invitreally using AAV2/2 vectors were compared to levels of unmodified NDI1 delivered also using AAV2/2. Levels of expression are expressed in copy number per unit of the housekeeping gene β-actin. As expression levels in FIGS. 5A and 5B are expressed in copy number per unit of the housekeeping gene β-actin, expression levels may be compared directly.

[0138] C, RT-PCR samples performed on RNA samples extracted from wild type mice which were intravitreally injected with AAV2/2 vectors expressing variants of the NDI1 gene and run on 3% agarose gels. Lanes 1 and 8, GeneRuler 100 bp DNA size ladder (Fermentas). The two lower bands of the ladder represent 100 and 200 bp. Lane 2, NDI1; Lane 3, NSG; Lane 4, NDI1 with V266I modification; Lane 5, NSG; Lane 6, humanised NDI1; Lane 7 Humanised NDI1 with I82V modification. NDI1 amplification product is 87 bp and humanised NDI1 amplification product is 115 bp. Equal amounts of PCR products were loaded into each well. The hNDI1 and NSG vectors resulted in visibly higher levels of expression than the unmodified NDI1 vector mirroring the findings in FIGS. 10a and 10b.

[0139] FIG. 11. Immunogenicity predictions of each 9-mer peptide fragment in NDI1, via in silico modelling of antigen presentation using the MHC class I predictor alone (FIG. 11a) or employing the MHC-I pathway using the IEDB proteasomal cleavage/TAP transport/MHC class I combined predictor (FIG. 11b). Immunogenicity scores and amino acid positions are presented.

[0140] FIG. 12A. Oxygraphs for NSG constructs Trace showing oxygen concentration (blue line) and oxygen consumption (red line) in media containing untransfected cells (negative control A), cells transfected with wild-type Ndi1 (B) and cells transfected with NSG, a construct expressing both wild-type NDI1 and GDNF (C). In each case, cells were analysed without rotenone and a steady respiration level measured. Once respiration stabilized and a measurement taken, 5 μmol rotenone was added and a measurement of rotenone-insensitive respiration taken once oxygen consumption stabilized.

[0141] FIG. 12B: A bar chart of the data from NSG and NDI1 transfected HeLa cells is presented. NSG and NDI1 transfected HeLa cells did not differ significantly from each other p=0.6, however, both significantly retained oxygen consumption compared to untransfected controls (NSG p<0.05 and NDI1 p<0.01).

### DETAILED DESCRIPTION OF THE INVENTION

[0142] In the present invention delivery of NDI1 constructs (FIG. 1) has been used to protect cells in the presence of a complex I inhibitor, rotenone, (FIGS. 2-8 and 12), HeLa cells and retinal ganglion cells (RGCs) were protected in the presence of NDI1 delivered as a wild type construct or as codon-optimised and immuno-optimised constructs (FIGS. 2-4). For example, RGCs, the cells primarily affected in LHON, were protected in a rotenone-induced murine model of LHON. Recombinant AAV serotype 2 (AAV2/2) expressing wild type NDI1 from a CMV promoter (AAV-NDI1, FIG. 1A) was administered to mice using a single intravitreal injection. AAV2/2 administered through this route has been shown to infect RGCs efficiently. Moreover, intravitreal injection typically results in a broad area of retinal transduction as the vitreous contacts the entire underlying retinal surface³². Intravitreal injection of AAV provides a route of administration for the gene therapy which is directly applicable to human patients and is routinely used to administer drugs such as Avastin and Lucentis for treatment of wet AMD. In this study, intravitreal injection of AAV-NDI1 was utilised for the first time and was shown significantly to reduce RGC death and optic nerve atrophy seen in untreated eyes in response to rotenone administration and moreover, led to a preservation of retinal function as assessed by manganese enhanced magnetic resonance imaging (MEMRI) and optokinetic responses (OKR; FIGS. 5-8).

[0143] In the present Application, intravitreal injection of AAV-NDI1 provided substantial protection against rotenone-induced insult, as assessed by a variety of assays (FIGS. 5-8). Notably, histological analyses demonstrated significant protection of both RGCs and the optic nerve (FIGS. 5 and 6). Furthermore, MEMRI indicated that AAV-NDI1 treatment preserved optic nerve function by enabling active transport of manganese ions through the optic nerve using voltage-gated calcium channels and hence provided evidence of the improved functional integrity of the optic nerve tissue in AAV-NDI1 treated eyes compared to control eyes (FIG. 7). Evaluation of visual function by optokinetics showed that the protection of RGCs and optic nerve integrity afforded by AAV-NDI1 led to preservation of mouse vision in the presence of the complex I inhibitor rotenone (FIG. 8). The results highlight the potential therapeutic value of NDI1-based therapies for LHON when intravitreally delivered using AAV2/2.

[0144] Following the successful delivery of AAV-NDI1 to RGCs using intravitreal injection, NDI1 was codon optimised so that codons which are used more frequently in mammalian cells were introduced to the NDI1 yeast gene. Codon modifications from 1-329 codons can be implemented to optimize expression of NDI1 in mammals while maintaining wild type amino acids. The maximal number of codons that can be altered in NDI1 to align codons with those most frequently used in mammals is 329 codons and these alterations were employed to generate a construct termed OphNDI1 and also known as humanized NDI1 (hNDI1). Plasmids containing OphNDI1 (hNDI1) or wild type NDI1, both expressed from a cytomegalovirus (CMV) promoter and containing a minimal polyadenylation (PolyA) signal, a modified rabbit beta-globin polyadenylation signal, were transiently transfected into HeLa cells using lipofectamine. Levels of NDI1 protein expression from NDI1 and hNDI1 constructs were compared using Western Blot analysis. hNDI1 (OphNDI1) was determined to express more highly than wild type NDI1 indicating that codon optimising the NDI1 gene has indeed enhanced expression in mammalian cells (FIGS. 9a, 9b and 10). A statistically significant difference in levels of expression was obtained between wild type and optimized NDI1 constructs (FIGS. 9a and 9b). The results obtained for NDI1 protein (FIGS. 9a and 9b) are mirrored by those obtained at the RNA level in mice intravitreally injected with AAV wild type and optimized NDI1 constructs using real-time RT PCR as the assay (FIG. 10).

[0145] In addition both the wild type and the codon-optimised NDI1 constructs have been immuno-optimised by introducing one or more amino acid changes to modulate the immune response(s) (Table 1a & 1b and Sequence Listing). Amino acid modifications were undertaken subsequent to in silico analyses for potential immunogenic sites within NDI1 (see FIGS. 11a and 11b, material and methods). Immuno-optimised constructs were generated for both the wild type NDI1 construct and for the codon-optimised hNDI1 construct. Modified codon-optimised and immuno-optimised NDI1 constructs were generated as high titre AAV2/2 vectors (1-5×10¹¹ vg/ml) using triple plasmid transfection methods in 293 cells followed by cesium chloride gradient purification of virus. Representative immuno-optimised NDI1 and immuno-optimised hNDI1 constructs inter alia V45I, I82V, L89I, I90Y, V266I, L481I, L483M were generated as plasmids and or AAV vectors. All nucleated mammalian cells present peptide fragments bound to MHC-I molecules on their cell surface. These fragments are derived from the degradation of proteins in the cytoplasm. As such, MHC-I presentation offers a snapshot of the pool of proteins being produced within each cell. Cytotoxic T-cells inspect the peptide fragments presented by cells and can induce apoptosis in cells presenting non-self proteins, which is usually an indicator of viral infection. HeLa cells were transfected with NDI1, hNDI1 and immuno-optimised constructs and levels of rotenone insensitive respiration evaluated (FIGS. 2-4, 12). Significant retention of oxygen consumption was observed in cells transfected with NDI1, codon-optimised and immuno-optimised constructs (FIGS. 2-4, 12), when compared to untransfected control cells.

[0146] In addition, to codon-optimized and immuno-optimized NDI1 constructs, a dual component construct was generated containing the CMV promoter driven NDI1 gene together with a ubiquitin promoter driven glial derived neurotrophic factor (GDNF) gene (NSG), the latter employing a neurturin polyA signal (FIG. 1) and generated as an AAV2/2 vector (AAV-NSG). Significantly higher levels of expression of NDI1 were achieved from this vector in vivo in mice after intravitreal injection compared to AAV-NDI1 as evaluated by real time RT-PCR assays (FIGS. 10a and 10c). GDNF expression from AAV-NSG was confirmed in mouse retinas by real time RT-PCR. Furthermore, intravitreally delivery of AAV-NSG resulted in preservation of cell function as evaluated by oxygen consumption measurements in rotenone treated HeLa cells (FIG. 12) and functional preservation in vivo using MRI analyses of wild type mice intravitreally injected with AAV-NSG vector (FIG. 7). Mean MRI signal intensity for DMSO was 2.38±0.04, for rotenone alone was 2.30±0.06, for AAV-NDI1 plus rotenone was 2.35±0.07 and for AAV-NSG plus rotenone was 2.37±0.07, significant differences were found between the rotenone alone treated mice and those treated with rotenone and either AAV-NDI1 or AAV-NSG; for both rotenone versus AAV-NDI1 and rotenone versus AAV-NSG comparisons, p<0.01 (**). Indeed AAV-NDI1 (plus rotenone) or AAV-NSG (plus rotenone) treated mice did not differ significantly from wild type control mice treated with DMSO alone. Notably these MRI results were established using a 4-fold lower titre of AAV-NSG than AAV-NDI1 (5.99×10¹¹ vp/ml versus 2.5×10¹¹ vp/ml) Suggesting that less AAV-NSG is required to mediate an equivalent beneficial effect.

[0147] Cohorts of adult wild type mice were intravitreally injected with 3 ul of AAV2/2 vectors expressing either NDI1, hNDI1, immuno-optimised hNDI1 I82V, immuno-optimised NDI1 V266I or AAV-NSG. Two weeks post-injection retinas were harvested from treated mouse eyes and total RNA extracted. Levels of expression from AAV vectors in mouse retinas were evaluated by real time RT-PCR (FIG. 10). Levels of expression from different vectors could be directly compared as expression was evaluated by absolute copy number per unit of β-actin (the housekeeping control) for each vector. The standard curves were generated using plasmid DNA standards with known copy number. Expression levels achieved after AAV intravitreal injection of vectors were greater in mouse eyes treated with AAV-hNDI1 or AAV-NSG treated eyes compared to AAV-NDI1 injected eyes (FIG. 10).

[0148] All gene therapies which deliver non-human proteins risk activation of cytotoxic T-cell responses following presentation of peptide fragments derived from the transgenic protein. It is therefore important to the success of the treatment that immunogenicity of the transgenic protein is modulated. One of the most effective ways this can be done is by searching the sequence of the protein for fragments which are likely to strongly bind MHC-I, increasing the likelihood that they will be presented on the cell surface and so induce an immune reaction.

[0149] This approach is complicated somewhat by the presence of many different MHC-I alleles in the human population, each of which may have slightly different binding affinities for different peptides.

[0150] There are established bioinformatics methods for predicting the MHC-I binding affinity of a particular peptide, several of which are available as downloadable tools. For our purposes, the consensus prediction method of Nielsen et al (Protein Sci. 2003 May; 12(5):1007-17) was most suitable, in addition to having excellent experimentally-validated accuracy. These tools were adapted and supporting software generated to enable prediction of affinity for a wide variety of MHC-I alleles. The computational tool thus generated may be applied and modified to predict other types of immune responses.

[0151] All potential peptide fragments that could be derived from the Ndi1 protein were assayed by the consensus prediction method for binding affinity to all well-characterised human MHC-I proteins.

### Methods

[0152] Vector Construction and AAV Production

[0153] Yeast NDI1 (Accession No: NM_{—}001182483.1) was cloned as described⁵³. Briefly, NDI1 was PCR amplified from total yeast DNA extracted from S288c using the following primers F: TTCTCGAGGTAGGGTGTCAGTTTC (SEQ ID NO: 543) and R: AAAGCGGCCGCAGTGATCAACCAATCTTG (SEQ ID NO: 544) and cloned into XhoI and NotI sites of pcDNA3.1- (Invitrogen, Paisley, UK). A minimal poly-adenylation signals⁴ was cloned downstream of NDI1 using NotI and EcoRV. The CMV immediate early promoter (present in pcDNA3.1-), the NDI1 gene and poly-adenylation signal were isolated on a MluI and EcoRV fragment, end filled and cloned into the NotI sites of pAAV-MCS (Agilent Technologies, La Jolla, Calif., USA) to create pAAV-NDI; FIG. 1. pAAV-EGFP was cloned as previously described¹⁹.

[0154] The entire human GDNF coding sequence from the atg start codon (nucleotides 201-836 of accession number NM_{—}000514) was cloned 3-prime of a 347 bp human Ubiquitin promoter (nucleotides 3557-3904 of accession number D63791) and a human Neurturin polyA consisting of nucleotides 1057-1160 of accession number AL161995 was cloned down-stream of the GDNF gene. This entire ubiquitin-driven GDNF cassette, including Neurturin polyA was cloned downstream of the CMV-driven NDI1 (including the rabbit b-globulin polyA).

[0155] Codon optimized NDI1 sequences and/or with amino acid changes to reduce immunogenicity profiles were synthesized by Geneart Inc. These were isolated on a XbaI and XhoI fragment and cloned into pAAV-MCS (Agilent Technologies, La Jolla, Calif., USA) and pcDNA3.1- (Invitrogen, Paisley, UK) plasmids with a CMV immediate early promoter and minimal polyA and verified by DNA sequencing.

[0156] Recombinant AAV2/2 viruses, AAV-ND1, AAV-NSG, pAAV-NDI1 V266I, AAV-huNDI1, pAAV-huNDI1 182V and AAV-EGFP were prepared as described²⁰, with a modified cesium chloride gradient as described¹⁹ Additional AAV-ND1, AAV-NSG recombinant AAV2/2 viruses were generated by the Gene Vector production Center of Nantes. Genomic titres (DNase-resistant viral particles per milliliter; vp/ml) were determined by quantitative real-time-polymerase chain reaction (qRT-PCR) according to the method of Rohr et al.²¹

### Cell Culture

[0157] Human cervical carcinoma cells (HeLa, ATCC accession no. CCL-2) were transfected with pAAV-NDI1 or pAAV-EGFP using Lipofectamine 2000 reagent, according to the manufacturer's instructions (Invitrogen, Carlsbad, Calif., USA). 5×10⁵ cells per well were seeded onto 6-well plates containing 1 ml Dulbecco's modified Eagle medium supplemented with 10% calf serum, 2 mM glutamine and 1 mM sodium pyruvate and incubated overnight at 37° C. Media was then aspirated and the cells were washed twice with phosphate-buffered saline (PBS). Each well was transfected with 1 μg pAAV-NDI1 or 1 μg pAAV-EGFP in triplicate. Cells were harvested 48 hrs later and the cells from each triplicate pooled for an individual experiment, each experiment was repeated in triplicate.

### Mitochondrial Isolation and Western Blot Analysis

[0158] Mitochondria were isolated from HeLa cells using Anti-TOM22 microbeads (Mitochondria isolation kit, Miltenyi Biotec GmbH, Germany). Isolated mitochondria were washed twice in PBS and homogenised in 100 μl radioimmunoprecipitation assay (RIPA) buffer (150 mM NaCl, 1% Triton X-100, 0.5% sodium deoxycholate, 0.1% SDS, 50 mM TrisCl pH 8.0 and 1 protease inhibitor cocktail tablet/10 mls (Roche, Mannheim, Germany)). The homogenate was centrifuged at 10,000 g for 20 min at 4° C. and the supernatant removed for analysis. Normalised protein samples were separated on 12% polyacrylamide gels and electrophoretically transferred to PVDF membranes (Bio-Rad, Berkley, Calif., USA). The PVDF membrane was blocked with 5% non-fat milk in tris buffered saline (TBS, 0.05M Tris, 150 mM NaCl, pH 7.5) and 0.05% (vol/vol) Tween 20 for 1 hr at room temperature. Rabbit polyclonal antibodies to NDI1 (1:500, Cambridge Research Biochemicals, Cleveland, UK) and VDAC1 (1:1000, Abcam, Cambridge, UK) were diluted in 5% milk and incubated overnight at 4° C. Membranes were washed twice with TBS and incubated with a secondary anti-rabbit (IgG) horseradish peroxidise-conjugated antibody (1:2500, Sigma-Aldrich, St. Louis Mo., USA) for 2 hr at room temperature, exposed to Super-Signal chemiluminescent substrate and enhancer (Pierce Biotechnology, Rochford, Ill., USA) and signal detected using X-ray film (Kodak, Rochester, N.Y., USA). All Western blots were repeated three times.

### Respiratory Analysis

[0159] Respiratory measurements were performed in DMEM at 37° C. on an Oxygraph-2k (OROBOROS® INSTRUMENTS GmbH, Innsbruck, Austria) according to the manufacturer's instructions. Briefly, each chamber was calibrated with 2 mls DMEM and stirred (200 rpm) for 1 hr to saturate the media with oxygen. Parallel experiments were run in the two chambers of the Oxygraph-2k using 1×10⁶ pAAV-NDI1 or 1×10⁶ pAAV-EGFP transfected HeLa cells. Following the addition of cells to the oxygen saturated media the chamber size was reduced to 2 ml to remove air. Continuous readings were taken to establish the fully oxygenated baseline. 2 ul 5 mM rotenone (5 μM in 100% ethanol) was added to 1×10⁶ pAAV-NDI1 or 1×10⁶ pAAV-EGFP transfected HeLa cells prior to transfer to the requisite chambers and continuous post-rotenone readings taken. Continuous readings were taken both with and without rotenone until oxygen consumption stabilised. Readings were taken from three independent transfections for each construct.

### Animals and Intravitreal Injections

[0160] Wild type 129 S2/SvHsd (Harlan UK Ltd, Oxfordshire, UK) mice were maintained under specific pathogen free (spf) housing conditions. Intravitreal injections were carried out in strict compliance with the European Communities Regulations 2002 and 2005 (Cruelty to Animals Act) and the Association for Research in Vision and Ophthalmology (ARVO) statement for the use of animals. Briefly, adult mice were anaesthetised and pupils dilated as described⁵⁷. Using topical anaesthesia (Amethocaine), a small puncture was made in the sclera. A 34-gauge blunt-ended microneedle attached to a 10 μl Hamilton syringe was inserted through the puncture, and 0.6 μl 2.5 mM rotenone (1.5 nmol) in dimethyl sulfoxide (DMSO, vehicle), 0.6 μl DMSO alone or 3 μl 1×10¹² vp/ml AAV2/2 was slowly, over a two minute period, administered into the vitreous. Following intravitreal injection, an anesthetic reversing agent (100 mg/10 g body weight; Atipamezole Hydrochloride) was delivered by intraperitoneal injection. Body temperature was maintained using a homeothermic heating device. All animal studies have been approved by the authors' Institutional Review Board.

### RNA Extraction and PCR Analysis

[0161] Adult wild type mice (n=6) were intravitrally injected with 3×10⁹ vp AAV-NDI1 while fellow eyes received 3×10⁹ vp AAV-EGFP. Retinas were harvested two weeks post-injection and total RNA extracted using the Qiagen RNeasy kit according to the manufacturers specification. In vivo expression of NDI1 from AAV-NDI1 was confirmed by reverse transcription PCR (RT-PCR) on a 7300 Real Time PCR System (Applied Biosystems, Foster City, Calif., USA) using a QuantiTect SYBR Green RT-PCR kit (Qiagen Ltd., Crawley, UK) and resulting amplification products separated and sized on 2.5% agarose gels. The following primers were used: NDI1 forward primer 5′ CACCAGTTGGGACAGTAGAC 3′ (SEQ ID NO: 545) and NDI1 reverse primer: 5′ CCTCATAGTAGGTAACGTTC 3′ (SEQ ID NO: 546). Humanised forms of NDI1 transcript were RT-PCR amplified with hNDI1 forward primer 5′ GAACACCGTGACCATCAAGA 3′ and hNDI1 reverse primer 5′ GCTGATCAGGTAGTCGTACT 3′ β-actin was used as an internal control as described (ref). RT-PCRs were performed twice in triplicate or quadruplicate. Levels of NDI1 or humanised NDI1 expression were determined by real time RT PCR using the Quantitect SYBR green RT PCR kit (Qiagen). Briefly, the copy number of two plasmid DNA preparations containing either NDI1 or humanized NDI1 was determined by spectraphotometry on a NanoDrop and serial dilutions of these plasmid DNA preparations were prepared containing between 10e2-10e7 copies/μl. These standard curves were included in 96-well plates that also included RNA samples to be analysed. Hence expression levels from all constructs, whether humanized or not, could be compared using absolute copy number, even though the primer pairs used for non humanized and humanized PCR amplification were not the same. Expression levels were normalized using the internal housekeeping gene β-actin.

### Histology

[0162] Eyes and optic nerves were fixed in 4% paraformaldehyde in PBS (pH 7.4) overnight at room 4° C. washed three times with PBS and cryoprotected using a sucrose gradient (10%, 20%, 30%). 10 μm sections were cut on a cryostat (HM 500 Microm, Leica, Solms, Germany) at −20° C. Nuclei were counterstained with 4′,6-diamidino-2-phenylindole (DAPI). Specimens were analysed with a Zeiss Axiophot fluorescence microscope (Carl Zeiss, Oberkochen, Germany). Corresponding microscope images taken with different filters were overlaid using Photoshop v. 10 (Adobe Systems Europe, Glasgow, UK). For ganglion cell (GCL) counts the ganglion cells were labelled using NeuN (Abcam, Cambridge, UK) immunohistochemistry as previously described. The primary antibody was diluted 1:100 and visualised using cy3-conjugated anti-mouse-IgG secondary antibody (Jackson ImmunoResearch Europe, Suffolk, UK). Four retinal sections per eye from four mice per group were analysed (n=4). The sections were taken approximately 150 μm apart in the central retina (600 μm span in total); 2 counts per section i.e. 8 counts per eye in total, were made using the count tool in Photoshop (Adobe systems). The diameter of the optic nerves was determined at approximately 5 mm from the optic nerve head from 3 animals per group (n=3). Three measurements per nerve were made approximately 150 μm apart using the ruler tool in Photoshop (Adobe Systems). Procedures for TEM were as previously described. Briefly, three weeks post-rotenone injection optic nerves were fixed in 4% paraformaldehyde in phosphate-buffered solution and fixed in 2.5% glutaraldehyde in 0.1M cacodylate buffer (pH 7.3) for 2 hr at room temperature. Washed specimens were post-fixed in buffered 2% osmium tetroxide, dehydrated and embedded in araldite. Ultrathin cross-sections were cut on a vibratome (Leica VT 1000 S), analysed using a Tecnai 12 BioTwin transmission electron microscope (FEI, Eindhoven, Holland) and imaged with a SIS MegaView III surface channel charge-coupled device (SCCD) camera (Olympus Soft Imaging Solutions, Münster, Germany). The total number of membrane debris particles in the images was counted in 5 cross sections per optic nerve from 3 animals per group (n=3).

### Magnetic Resonance Imaging

[0163] Optic nerve integrity in experimental and control mice was assessed by Manganese (Mn²⁺) enhanced magnetic resonance imaging (MEMRI) technique using a 7 T Bruker Biospec 70/30 magnet (Bruker Biospin, Etlingen, Germany). MEMRI demarcates active regions of the brain due to the ability of Mn²⁺ ions to enter excitable cells through voltage-gated calcium channels, thus analysis of Mn²⁺ transport through the optic nerve provides a good measure of its integrity. Two hours prior to scanning, mice were anaesthetised and intravitreally injected, as described above, with 2 μl of 20 mg/ml manganese chloride solution. For image acquisition, mice were maintained under sedation with ketamine (375 μg/10 g body weight) and placed on an MRI-compatible cradle which maintains the animal's body temperature at 37° C. (respiration and temperature were monitored for the duration of experiment). The cradle was positioned within the MRI scanner and an initial rapid pilot image acquired to ensure accurate positioning of the mouse. Oblique coronal T₁-weighted 2D images were acquired using FLASH sequence (TR/TE:150/2.5 ms; Matrix: 128×128; Field of View: 20×20 mm²; Flip Angle 50°; number of averages: 40, the pixel resolution was 0.156 mm/pixel). In the oblique coronal orientation (36°), 20 slices, each measuring 0.35 mm in thickness with 0.45 mm inter slice gap, were recorded for an acquisition time of 9 min 36 sec. MRI scans corresponding to the area immediately superior to the optic chiasm provided more consistent images compared to the optic nerve itself due to the variations in physically positioning each animal. Log signal intensities in this region were quantified using Image J© software (http://imagej.nih.gov/ij/).

### Optokinetics

[0164] Optokinetic response (OKR) spatial frequency thresholds were measured blind by two independent researchers using a virtual optokinetic system (VOS, OptoMotry, CerebralMechanics, Lethbridge, AB, Canada). OptoMotry³⁶ measures the threshold of the mouse's optokinetic tracking response to moving gratings. Briefly, a virtual-reality chamber is created with four 17 inch computer monitors facing into a square and the unrestrained mouse was placed on a platform in the centre. A video camera, situated above the animal, provided real-time video feedback. The experimenter centred the virtual drum on the mouse's head and judged whether the mouse made slow tracking movements with its head and neck. The spatial frequency threshold, the point at which the mouse no longer tracked, was obtained by incrementally increasing the spatial frequency of the grating at 100% contrast. A staircase procedure was used in which the step size was halved after each reversal, and terminated when the step size became smaller than the hardware resolution (˜0.003 c/d, 0.2% contrast). One staircase was presented for each direction of rotation to measure each eye separately, with the two staircases being interspersed.

### Statistical Analysis

[0165] Data sets of treated and untreated samples were pooled, averaged and standard deviation (SD) values calculated. Statistical significance of differences between data sets was determined by either Student's two-tailed t-test or ANOVA used with Tukey's multiple comparison post hoc test. In addition, the Kruskall-Wallis one-way analysis of variance was applied to the MRI data set and Mann Whitney U-tests were undertaken on all other data sets to establish that statistical significance was maintained using nonparametric statistical models. Analysis was performed using Prism v. 5.0 c (GraphPad Software, La Jolla, Calif., USA); differences with p<0.05 were considered statistically significant

### Predictions of Immunogenic Codons

[0166] All potential peptide fragments that could be derived from the Ndi1 protein were assayed by the consensus prediction method for binding affinity to all well-characterised human MHC-I proteins. All epitopes displaying a high affinity for MHC-I (defined as a predicted IC50<500 nM) were noted, along with the corresponding MHC-I allele to which they had displayed high binding affinity. Each potential peptide fragment was then assigned an ‘immunogenicity score’, defined as the sum of the frequencies of all MHC-I alleles in the global human population for which it had a high binding affinity. The highest-scoring fragments were then selected for potential modification to reduce immunogenicity. All possible single amino acid mutations for each of these immunogenic fragment sequences were generated, and each was assayed for immunogenicity by the above methods. In addition, the BLOSUM62 matrix was used to calculate the sequence similarity between the original and mutated sequences. For each fragment, an optimal immunogenicity-reducing mutation was chosen. This was done by taking the set of all potential mutations for that fragment and eliminating all fragments which had an immunogenicity score greater than half of the immunogenicity score of the original fragment. The sequence with the highest sequence similarity to the original fragment (as defined by the BLOSUM62 matrix) was selected as the optimal substitution for that position.

[0167] In addition to the analyses described above using information regarding MHC-1 alone, immunogenicity estimation and reduction in Ndi1 was achieved via in silico modelling of antigen presentation via the MHC-I pathway using the IEDB proteasomal cleavage/TAP transport/MHC class I combined predictor.

[0168] As fragments of 9 amino acids in length are the most commonly presented fragments by MHC-I, all possible sequences of 9 consecutive amino acids that could be derived from Ndi1 were listed and passed to the IEDB predictor for analysis. For every 9-mer peptide P and MHC-I allele i, an immunogenicity value G_{p,i} was generated which is proportional to the amount of that fragment that would be displayed on the cell surface by a given MHC-I allele, taking into account proteasomal degradation, transport and binding by MHC-I.

[0169] An overall immunogenicity factor Fₚ for the 9-mer peptide was then calculated as

$${F}_{p} = {\sum }^{i} {G}_{p , i} {N}_{i}$$

where Nᵢ is the estimated prevalence of each allele in the global human population as a fraction of the total pool of alleles, calculated using population frequency data from The Allele Frequency Net Database (Gonzalez-Galarza et al, 2011). In other words, Fₚ represents the mean amount of that fragment that would be displayed on the surface of a cell for all MHC-I alleles, weighted by how frequently each allele occurs in the human population.

[0170] Each amino acid position A in the Ndi1 peptide was then assigned an immunogenicity score S_{A} defined as the sum of the immunogenicity factors for all 9-mer peptides containing that amino acid. All positions whose immunogenicity score was less than one-fifth of the highest score were not considered further, as mutations at these positions would not be able to significantly affect the overall immunogenicity of the protein.

[0171] For each of the remaining positions, a BLOSUM matrix (Henikoff and Henikoff, 1992) was used to identify potential mutations that would not be overly disruptive to the structure or function of Ndi1. A BLOSUM matrix is calculated by aligning homologous protein sequences from many species against each other, and comparing the frequency with which each amino acid is replaced by every other amino acid.

[0172] For two amino acids x and y, the BLOSUM score B_{x,y} is defined as the log-likelihood of the amino acid x replacing y or vice-versa in a given position in homologous peptides. As a direct consequence of this definition, B_{x,y}=B_{y,x} for all x and y (in other words, all BLOSUM matrices are symmetric).

[0173] A high BLOSUM score for an amino-acid pair indicates that mutations changing one of those amino acids to the other are more likely to be observed in homologous proteins, indicating that such changes are less likely to severely disrupt protein structure. A BLOSUM score can also be calculated between each amino acid and itself (B_{x,x}), indicating the likelihood that that amino acid will remain constant between homologous proteins.

[0174] For all possible mutations at a given position, ΔB was defined as the change in the BLOSUM score for that mutation. More formally, given an initial amino acid x and a candidate replacement amino acid y, ΔB=B_{x,x}−B_{x,y}. All mutations for which ΔB was greater than 4 were considered too disruptive to protein function and not analysed further.

[0175] For all remaining candidate mutations, immunogenicity factors F and scores S were recalculated for the post-mutation peptide using the IEDB predictor. The reduction in immunogenicity ΔS was then determined, defined as the difference between the score S for that position in the original peptide versus the new score S after mutation.

[0176] All possible mutations were then ranked by the metric

$$\frac{Δ S}{Δ B} .$$

High values of

$$\frac{Δ S}{Δ B}$$

represent mutations which are likely to cause a large reduction in immunogenicity with a relatively small predicted impact on protein function. Outputs with predicted amino acids and scores are provided in Table X.

[0177] The invention is not limited to the embodiments hereinbefore described which may be varied in construction and detail without departing from the spirit of the invention.

### REFERENCES

[0178] 1. Yu-Wai-Man P, Griffiths P G, Chinnery P F. Mitrochondrial optic neuropathies—disease mechanisms and therapeutic strategies. Prog Retin Eye Res. 30:81-114 (2011).
[0179] 2. Chalmers R M and Schapira A H. Clinical, biochemical and molecular genetic features of Leber's hereditary optic neuropathy. Biochim Biophys Acta. 1410 (2):147-158 (1999).
[0180] 3. Mackey D A, Oostra R J, Rosenberg T, Nikoskelainen E, Bronte-Stewart J, Poulton J, Harding A E, Govan G, Bolhuis P A, Norby S. Primary pathogenic mtDNA mutations in multigeneration pedigrees with Leber hereditary optic neuropathy. Am J Hum Genet. 59 (2):481-485 (1996).
[0181] 4. Jarrett S G, Lin H, Godley B F, Boulton M E. Mitrochondrial DNA damage and its potential role in retinal degeneration. Prog Retin Eye Res. 27 (6):596-607 (2008).
[0182] 5. Ames A 3^{rd}. CNS energy metabolism as related to function. Brain Res Brain Res Rev. 34:42-68 (2000).
[0183] 6. Yen M Y, Wang A G, Wei Y H. Leber's hereditary optic neuropathy: a multifactorial disease. Prog Retin Eye Res. 25 (4):381-396 (2006).
[0184] 7. Porter R K, Joyce O J, Farmer M K, Heneghan R, Tipton K F, Andrews J F, McBennett S M, Lund M D, Jensen C H, Melia H P. Indirect measurement of mitochondrial proton leak and its application. Int J Obes Relat Metab Disord. 23 (Suppl 6):512-18 (1999).
[0185] 8. Yamada K, Mashima Y, Kigasawa K, Miyashita K, Wakakura M, Oguchi Y. High incidence of visual recovery among four Japanese patients with Leber's hereditary optic neuropathy with the 14484 mutation. J. Neuroophthalmol. 17 (2):103-107 (1997).
[0186] 9. Marcuello A, Martinez-Redondo D, Dahmani Y, Casajús J A, Ruiz-Pesini E, Montoya J, López-Pérez M J, Díez-Sánchez C. Human mitochondrial varienats influence on oxygen consumption. Mitochondrion. 9:27-30 (2009).
[0187] 10. Hudson G, Carelli V, Spruijt L, Gerards M, Mowbray C, Achilli A, Pyle A, Elson J, Howell N, La Morgia C, Valentino M L, Huoponen K, Savontaus M L, Nikoskelainen E, Sadun A A, Salomao S R, Belfort R Jr, Griffiths P, Man P Y, de Coo R F, Horvath R, Zeviani M, Smeets H J, Torroni A, Chinnery P F. Clinical expression of Leber hereditary optic neuropathy is affected by the mitrochondrial DNA-haplogroup background. Am J Hum Genet. 81:228-233 (2007).
[0188] 11. Shankar S P, Fingert J H, Carelli V, Valentino M L, King T M, Daiger S P, Salomao S R, Berezovsky A, Belfort R Jr, Braun T A, Sheffield V C, Sadun A A, Stone E M. Evidence for a novel x-linked modifier locus for leber hereditary optic neuropathy. Ophthalmic Genet. 29 (1):17-24 (2008).
[0189] 12. Tsao K, Aitken P A, Johns D R. Smoking as an aetiological factor in a pedigree with Leber hereditary optic neuropathy. Br J. Ophthalmol. 83 (5):577-581 (1999).
[0190] 13. Giordano C, Montopoli M, Perli E, Orlandi M, Fantin M, Ross-Cisneros F N, Caparrotta L, Martinuzzi A, Ragazzi E, Ghelli A, Sadun A A, d'Amati G, Carelli V. Oestrogens ameliorate mitochondrial dysfunction in Leber's hereditary optic neuropathy. Brain. 134 (Pt 1):220-234 (2011).
[0191] 14. Qi X, Sun L, Lewin A S, Hauswirth W W, Guy J. The mutant human ND4 subunit of complex I induces optic neuropathy in the mouse. Invest Ophthalmol Vis Sci. 48 (1):1-10 (2007).
[0192] 15. Ellouze S, Augustin S, Bouaita A, Bonnet C, Simonutti M, Forster V, Picaud S, Sahel J A, Corral-Debrinski M. Optimized allotopic expression of the human mitochondrial ND4 prevents blindness in a rat model of mitochondrial dysfunction. Am J Hum Genet. 83 (3):373-387 (2008).
[0193] 16. Koilkonda R D, Guy J. Leber's Hereditary Optic Neuropathy-Gene Therapy: From Benchtop to Bedside. J Ophthalmol. 2011: 179412 [Epub ahead of print] (2011).
[0194] 17. Marella M, Seo B B, Yagi T, Matsuno-Yagi A. Parkinson's disease and mitochondrial complex I: a perspective on the Ndi1 therapy. J Bioenerg Biomembr. 41 (6):493-497 (2009).
[0195] 18. Marella M, Seo B B, Thomas B B, Matsuno-Yagi A, Yagi T. Successful amelioration of mitochondrial optic neuropathy using the yeast NDI1 gene in a rat animal model. PLoS One. 5 (7):e11472 (2010).
[0196] 19. Palfi A, Millington-Ward S, Chadderton N, O'Reilly M, Goldmann T, Humphries M M, Li T, Wolfrum U, Humphries P, Kenna P F, Farrar G J. Adeno-associated virus-mediated rhodopsin replacement provides therapeutic benefit in mice with a targeted disruption of the rhodopsin gene. Hum Gene Ther. 2010 March; 21 (3):311-23.
[0197] 20. Ayuso E, Mingozzi F, Montane J, Leon X, Anguela X M, Haurigot V, Edmonson S A, Africa L, Zhou S, High K A, Bosch F, Wright J F High AAV vector purity results in serotype- and tissue-independent enhancement of transduction efficiency. Gene Ther. 2010 April; 17 (4):503-10.
[0198] 21. Rohr U P, Wulf M A, Stahn S, Steidl U, Haas R, Kronenwett R. Fast and reliable titration of recombinant adeno-associated virus type-2 using quantitative real-time PCR. J Virol Methods. 2002 October; 106(1):81-8.
[0199] 22. Kormann M S, Hasenpusch G, Aneja M K, Nica G, Flemmer A W, Herber-Jonat S, Huppmann M, Mays L E, Illenyi M, Schams A, Griese M, Bittmann I, Handgretinger R, Hartl D, Rosenecker J, Rudolph C. Expression of therapeutic proteins after delivery of chemically modified mRNA in mice. Nat. Biotechnol. 2011 February; 29 (2):154-7. doi: 10.1038/nbt.1733. Epub 2011 Jan. 9.
[0200] 23. Chaput J C, Yu H, Zhang S. The emerging world of synthetic genetics. Chem. Biol. 2012 Nov. 21; 19 (11):1360-71. doi: 10.1016/j.chembiol.2012.10.011.

### APPENDIX

TABLE 1a
Nucleic acid and amino acid sequences of the Invention.

| | Amino Acid | Nucleic Acid |
|---|---|---|
| Gene | Substitution | Sequence |
| Yeast NDI1 | FYLWRILYL | SEQ ID NO: 1 |
| Yeast NDI1 codon | FYLWRILYL | SEQ ID NO: 62 |
| optimised | | |
| Yeast NDI1 + 1amino | FYLWRILYL → | SEQ ID NO: 63 |
| acid change | FYLWRILYM | |
| Yeast NDI1 codon | FYLWRILYL → | SEQ ID NO: 134 |
| optimized + 1 amino | FYLWRILYM | |
| acid change | | |
| Yeast NDI1 + 2 amino | FYLWRILYL → | SEQ ID NO: 146 |
| acid change | FYLWRILYM | |
| | FLKEIPNSL → | |
| | FFKEIPNSL | |
| Yeast NDI1 codon | FYLWRILYL → | SEQ ID NO: 225 |
| optimized + 2 amino | FYLWRILYM | |
| acid change | FLKEIPNSL → | |
| | FFKEIPNSL | |

TABLE 1b

| | | | | | | Immunochange/ |
|---|---|---|---|---|---|---|
| Initial | Position | New | Immunoscore | Immunochange | Blosumchange | Blosumchange |
| I | 82 | V | 2.569262982 | 1.002693684 | 2 | 0.501346842 |
| F | 90 | Y | 1.926170105 | 1.497108683 | 3 | 0.499036228 |
| L | 89 | I | 2.104411858 | 1.253907982 | 3 | 0.417969327 |
| V | 266 | I | 0.667339713 | 0.362552877 | 1 | 0.362552877 |
| K | 214 | E | 0.712950213 | 0.70677809 | 4 | 0.176694523 |
| L | 481 | I | 0.885723713 | 0.498012741 | 3 | 0.166004247 |
| L | 202 | M | 0.608956047 | 0.315494717 | 2 | 0.157747359 |
| L | 259 | V | 0.594189679 | 0.469145841 | 3 | 0.156381947 |
| L | 195 | I | 0.565666654 | 0.465061673 | 3 | 0.155020558 |
| I | 81 | V | 0.852520887 | 0.266903644 | 2 | 0.133451822 |
| L | 150 | M | 0.656551833 | 0.259100799 | 2 | 0.129550399 |
| R | 85 | K | 2.714843954 | 0.43039463 | 4 | 0.107598657 |
| Y | 151 | F | 0.686249712 | 0.397772899 | 4 | 0.099443225 |
| Y | 482 | F | 0.891857027 | 0.37332648 | 4 | 0.09333162 |
| S | 488 | T | 0.562058188 | 0.361418691 | 4 | 0.090354673 |
| S | 80 | T | 0.674070843 | 0.301172594 | 4 | 0.075293149 |
| K | 196 | E | 0.618739275 | 0.284207587 | 4 | 0.071051897 |
| R | 206 | K | 0.780227471 | 0.247789757 | 4 | 0.061947439 |
| R | 490 | K | 0.590906411 | 0.237769694 | 4 | 0.059442424 |
| S | 145 | T | 0.67224222 | 0.225480169 | 4 | 0.056370042 |
| V | 147 | T | 0.671708207 | 0.210263616 | 4 | 0.052565904 |
| R | 479 | K | 1.226655337 | 0.210156887 | 4 | 0.052539222 |
| A | 489 | S | 0.587738848 | 0.201645996 | 4 | 0.050411499 |
| L | 212 | V | 0.717379457 | 0.144498379 | 3 | 0.048166126 |
| R | 492 | K | 0.564269712 | 0.191259766 | 4 | 0.047814941 |
| L | 262 | M | 0.596470347 | 0.084255646 | 2 | 0.042127823 |
| Q | 149 | E | 0.656724126 | 0.167775872 | 4 | 0.041943968 |
| T | 207 | S | 0.779275641 | 0.162365948 | 4 | 0.040591487 |
| Y | 476 | F | 1.203763001 | 0.154940174 | 4 | 0.038735043 |
| S | 201 | T | 0.598628015 | 0.145693616 | 4 | 0.036423404 |
| S | 86 | A | 2.752011125 | 0.111576956 | 4 | 0.027894239 |
| M | 473 | L | 0.621739886 | 0.108503212 | 4 | 0.027125803 |
| E | 265 | Q | 0.583898093 | 0.099401686 | 4 | 0.024850422 |
| E | 264 | Q | 0.583540076 | 0.086415603 | 4 | 0.021603901 |
| S | 148 | A | 0.642943664 | 0.069504199 | 4 | 0.01737605 |
| A | 261 | S | 0.592734437 | 0.053926096 | 4 | 0.013481524 |
| A | 209 | S | 0.725497927 | 0.039698254 | 4 | 0.009924564 |
| E | 213 | Q | 0.71301777 | 0.004330404 | 4 | 0.001082601 |

Initial: The amino acid at this position in the native protein
Position: Position in the protein
New: Replacement amino acid suggested by the program
Immunoscore: Immunoscore for this locus in the native protein.
Immunochange: Change in immunoscore between the native and the modified locus.
Blosumchange: The change in BLOSUM score between the native and the modified position (a measure of how conservative the change is, lower numbers being more conservative)
Immunochange/Blosumchange: The change in immunogenicity divided by the blosum change.

TABLE 1c
Output from immunogenicity analyses

| position | totalscore | mhcscore | tapscore | proteasomescore |
|---|---|---|---|---|
| 0 | 0.000165143 | 11.14069809 | 0.44351918 | 9.06162E−05 |
| 1 | 0.041457346 | 11.40019829 | 2.86360034 | 0.003448543 |
| 2 | 0.002426595 | 15.73665433 | 7.707479979 | 5.46497E−05 |
| 3 | 0.002526801 | 24.94091632 | 4.435191796 | 6.27721E−05 |
| 4 | 0.005897232 | 16.1032081 | 6.122268966 | 0.000162811 |
| 5 | 0.00032745 | 12.79123286 | 1.221553255 | 5.69915E−05 |
| 6 | 7.91604E−05 | 15.37844434 | 0.168621289 | 8.22938E−05 |
| 7 | 0.000166722 | 13.39406509 | 0.702930528 | 4.84144E−05 |
| 8 | 0.000109826 | 14.68630033 | 0.533227336 | 3.79468E−05 |
| 9 | 0.000316701 | 11.14069809 | 1.308917895 | 5.83262E−05 |
| 10 | 0.123430476 | 22.74638603 | 6.264874929 | 0.002349837 |
| 11 | 0.097134418 | 17.65681657 | 2.552186489 | 0.005899826 |
| 12 | 0.048628469 | 20.27273789 | 7.532036315 | 0.000863136 |
| 13 | 0.046499396 | 20.74495061 | 21.22816259 | 0.000286354 |
| 14 | 0.001693195 | 20.74495061 | 0.926642906 | 0.000243003 |
| 15 | 2.94196E−05 | 11.40019829 | 0.150283882 | 4.66216E−05 |
| 16 | 0.000555893 | 11.14069809 | 0.845108374 | 0.000157342 |
| 17 | 0.062993668 | 16.4783 | 9.055499382 | 0.001146233 |
| 18 | 0.000129314 | 12.79123286 | 0.212281626 | 0.000129245 |
| 19 | 0.000372025 | 11.93747308 | 1.250006885 | 6.79306E−05 |
| 20 | 0.000170764 | 11.40019829 | 0.656012939 | 6.24617E−05 |
| 21 | 0.017125463 | 13.39406509 | 2.437319175 | 0.00142792 |
| 22 | 8.29984E−05 | 14.68630033 | 0.360505924 | 4.22373E−05 |
| 23 | 0.000159095 | 14.02530793 | 0.558357566 | 5.49707E−05 |
| 24 | 3.85269E−05 | 12.50006885 | 0.222286151 | 3.77629E−05 |
| 25 | 0.000126872 | 14.68630033 | 0.533227336 | 4.48928E−05 |
| 26 | 0.000210364 | 11.14069809 | 0.970314241 | 5.24778E−05 |
| 27 | 5.09001E−05 | 9.929157627 | 0.352299807 | 4.009E−05 |
| 28 | 0.000168829 | 8.070722319 | 1.537844434 | 3.71193E−05 |
| 29 | 0.000363844 | 10.16043742 | 0.671293443 | 0.000146293 |
| 30 | 2.06189E−05 | 11.66574302 | 0.127912329 | 3.82109E−05 |
| 31 | 0.022132896 | 17.65681657 | 16.1032081 | 0.000209655 |
| 32 | 0.027879223 | 8.84937105 | 2.494091632 | 0.003429894 |
| 33 | 0.000123359 | 11.14069809 | 0.641080261 | 4.68999E−05 |
| 34 | 0.000806311 | 20.74495061 | 1.891961982 | 5.6086E−05 |
| 35 | 0.000356829 | 11.14069809 | 1.806809666 | 4.82049E−05 |
| 36 | 0.00055883 | 18.4889567 | 1.308917895 | 6.21902E−05 |
| 37 | 0.00163762 | 14.68630033 | 2.734717094 | 0.00010891 |
| 38 | 0.000115249 | 22.22861507 | 0.336443704 | 4.12917E−05 |
| 39 | 0.000191343 | 7.88701025 | 1.765681657 | 3.74729E−05 |
| 40 | 0.000491116 | 6.712934432 | 1.537844434 | 0.000129807 |
| 41 | 0.000677471 | 18.06809666 | 1.166574302 | 8.70739E−05 |
| 42 | 3.36856E−05 | 11.14069809 | 0.207449506 | 3.88118E−05 |
| 43 | 0.00014483 | 21.22816259 | 0.377496044 | 4.85281E−05 |
| 44 | 0.003264254 | 7.360586237 | 2.93030216 | 0.000402442 |
| 45 | 0.000140007 | 7.707479979 | 1.402530793 | 3.521E−05 |
| 46 | 3.62244E−05 | 11.40019829 | 0.232762174 | 3.73826E−05 |
| 47 | 0.000348616 | 16.1032081 | 1.339406509 | 4.33022E−05 |
| 48 | 0.004074612 | 34.42804843 | 3.774960444 | 8.44971E−05 |
| 49 | 0.001131584 | 11.66574302 | 2.122816259 | 0.000123023 |
| 50 | 0.002085286 | 19.81127403 | 3.213012427 | 8.89479E−05 |
| 51 | 4.51837E−05 | 10.39710441 | 0.32878531 | 3.62723E−05 |
| 52 | 3.03008E−05 | 14.68630033 | 0.114001983 | 4.98593E−05 |
| 53 | 3.76548E−05 | 10.88710484 | 0.261163455 | 3.596E−05 |
| 54 | 0.001659218 | 2.79123286 | 4.139161818 | 8.50937E−05 |
| 55 | 0.000149148 | 14.02530793 | 0.545647796 | 5.22381E−05 |
| 56 | 0.004171506 | 12.50006885 | 1.166574302 | 0.000776349 |
| 57 | 0.006443566 | 14.35199932 | 2.611634549 | 0.000465797 |
| 58 | 3.34281E−05 | 14.68630033 | 0.133940651 | 4.56139E−05 |
| 59 | 0.037127736 | 11.93747308 | 16.1032081 | 0.00052448 |
| 60 | 0.00663909 | 19.81127403 | 3.952868849 | 0.000229639 |
| 61 | 0.006458684 | 9.266429059 | 2.494091632 | 0.000758499 |
| 62 | 0.000340528 | 20.27273789 | 0.702930528 | 6.40334E−05 |
| 63 | 0.002881924 | 17.65681657 | 2.494091632 | 0.000178119 |
| 64 | 7.61656E−05 | 14.68630033 | 0.336443704 | 4.10584E−05 |
| 65 | 0.000209237 | 7.88701025 | 1.140019829 | 6.41994E−05 |
| 66 | 0.005967534 | 9.703142406 | 3.364437037 | 0.000493477 |
| 67 | 0.001955737 | 9.266429059 | 2.552186489 | 0.000221532 |
| 68 | 0.017604909 | 20.27273789 | 29.98557666 | 7.89816E−05 |
| 69 | 8.35826E−05 | 11.14069809 | 0.558357566 | 3.65261E−05 |
| 70 | 0.002594439 | 19.36031438 | 2.172263001 | 0.000165466 |
| 71 | 3.00088E−05 | 16.86212891 | 0.122155325 | 3.90383E−05 |
| 72 | 0.000919044 | 11.66574302 | 2.027273789 | 0.000106306 |
| 73 | 0.000624075 | 10.88710484 | 2.494091632 | 6.17683E−05 |
| 74 | 6.33881E−05 | 11.40019829 | 0.249409163 | 6.13181E−05 |
| 75 | 0.000697186 | 9.929157627 | 2.672467333 | 7.11732E−05 |
| 76 | 0.015140398 | 10.39710441 | 7.360586237 | 0.000539173 |
| 77 | 6.53066E−05 | 16.86212891 | 0.19811274 | 5.41402E−05 |
| 78 | 0.312040853 | 26.72467333 | 42.35575283 | 0.000759428 |
| 79 | 0.344490583 | 12.79123286 | 27.98416838 | 0.002643626 |
| 80 | 0.178480054 | 26.11634549 | 5.210895997 | 0.003561048 |
| 81 | 1.717661138 | 12.21553255 | 21.72263001 | 0.017177042 |
| 82 | 0.001404259 | 20.74495061 | 0.671293443 | 0.000273623 |
| 83 | 0.000277344 | 13.39406509 | 1.468630033 | 3.83701E−05 |
| 84 | 0.145284018 | 12.50006885 | 5.98290911 | 0.005274918 |
| 85 | 0.052307569 | 15.73665433 | 7.532036315 | 0.001198564 |
| 86 | 0.000858248 | 9.482271919 | 2.274638603 | 0.000108393 |
| 87 | 0.007596331 | 13.39406509 | 0.172548984 | 0.008925249 |
| 88 | 0.000542897 | 16.86212891 | 0.992915763 | 8.77791E−05 |
| 89 | 0.000238301 | 8.258713592 | 1.686212891 | 4.70592E−05 |
| 90 | 0.006680505 | 9.929157627 | 1.502838821 | 0.001238526 |
| 91 | 6.22969E−05 | 15.73665433 | 0.267246733 | 4.00927E−05 |
| 92 | 0.000881673 | 23.81839017 | 0.702930528 | 0.000142668 |
| 93 | 0.011560202 | 14.35199932 | 1.725489835 | 0.001248935 |
| 94 | 5.48864E−05 | 22.22861507 | 0.184889567 | 3.67735E−05 |
| 95 | 6.20843E−05 | 13.70605295 | 0.32878531 | 3.78829E−05 |
| 96 | 0.000404981 | 8.84937105 | 2.552186489 | 4.90042E−05 |
| 97 | 2.28667E−05 | 14.35199932 | 0.122155325 | 3.5317E−05 |
| 98 | 0.000413407 | 14.02530793 | 1.891961982 | 4.16191E−05 |
| 99 | 0.000498189 | 9.266429059 | 2.611634549 | 5.58373E−05 |
| 100 | 7.19144E−05 | 15.37844434 | 0.313987533 | 4.02088E−05 |
| 101 | 0.000134928 | 8.070722319 | 1.250006885 | 3.66345E−05 |
| 102 | 0.001767121 | 10.16043742 | 1.84889567 | 0.000253395 |
| 103 | 0.000489226 | 16.4783 | 1.686212891 | 4.78379E−05 |
| 104 | 0.000140668 | 17.25489835 | 0.464421595 | 4.76012E−05 |
| 105 | 0.489070827 | 0.68403046 | 29.3030216 | 0.001466533 |
| 106 | 0.001456535 | 13.39406509 | 1.016043742 | 0.000286335 |
| 107 | 0.031214534 | 14.68630033 | 3.862890569 | 0.001494362 |
| 108 | 0.000379244 | 6.264874929 | 1.725489835 | 9.6805E−05 |
| 109 | 0.002898725 | 11.66574302 | 1.686212891 | 0.000399516 |
| 110 | 0.014553946 | 9.482271919 | 2.437319175 | 0.001712156 |
| 111 | 7.03894E−05 | 12.21553255 | 0.423557528 | 3.71112E−05 |
| 112 | 9.96662E−05 | 13.08917895 | 0.584672147 | 3.58761E−05 |
| 113 | 0.001309179 | 11.66574302 | 2.552186489 | 0.000120062 |
| 114 | 0.000377961 | 15.73665433 | 0.864793477 | 7.53049E−05 |
| 115 | 0.164165075 | 20.272737893 | 7.74960444 | 0.000583111 |
| 116 | 0.070071877 | 12.791232863 | 7.74960444 | 0.000394384 |
| 117 | 0.000102335 | 18.4889567 | 0.377496044 | 4.00326E−05 |
| 118 | 0.000736796 | 13.39406509 | 0.825871359 | 0.00018023 |
| 119 | 8.86678E−05 | 21.22816259 | 0.299855767 | 3.78003E−05 |
| 120 | 0.000604388 | 12.50006885 | 1.088710484 | 0.000120905 |
| 121 | 0.000474711 | 16.4783 | 1.166574302 | 6.72969E−05 |
| 122 | 8.14247E−05 | 12.50006885 | 0.279841684 | 6.27394E−05 |
| 123 | 0.005779158 | 13.39406509 | 3.139875335 | 0.000379657 |
| 124 | 0.000168565 | 13.08917895 | 0.368903185 | 9.40827E−05 |
| 125 | 0.000141599 | 7.707479979 | 1.279123286 | 3.8882E−05 |
| 126 | 0.000109895 | 18.06809666 | 0.232762174 | 7.09543E−05 |
| 127 | 0.004081875 | 13.08917895 | 7.029305285 | 0.000120226 |
| 128 | 7.74925E−05 | 12.50006885 | 0.423557528 | 3.95401E−05 |
| 129 | 0.000199484 | 12.50006885 | 1.039710441 | 4.15659E−05 |
| 130 | 0.004654394 | 22.22861507 | 2.494091632 | 0.000231783 |
| 131 | 0.000117283 | 11.40019829 | 0.736058624 | 3.76417E−05 |
| 132 | 0.00250937 | 16.4783 | 1.806809666 | 0.000226837 |
| 133 | 0.000243602 | 11.66574302 | 1.435199932 | 3.90759E−05 |
| 134 | 2.0194E−05 | 11.93747308 | 0.122155325 | 3.74976E−05 |
| 135 | 0.00240769 | 23.81839017 | 3.952868849 | 6.94385E−05 |
| 136 | 7.18825E−05 | 13.39406509 | 0.2172263 | 6.62302E−05 |
| 137 | 0.000671558 | 15.37844434 | 1.221553255 | 9.76814E−05 |
| 138 | 0.029149146 | 12.79123286 | 2.552186489 | 0.002447701 |
| 139 | 0.000108191 | 19.81127403 | 0.202727379 | 7.34916E−05 |
| 140 | 0.000380177 | 14.35199932 | 1.61032081 | 4.46669E−05 |
| 141 | 0.042994713 | 19.36031438 | 5.092281523 | 0.001177354 |
| 142 | 0.597914802 | 11.66574302 | 36.05059237 | 0.003851289 |
| 143 | 0.000525873 | 11.40019829 | 1.64783 | 7.55946E−05 |
| 144 | 0.000425877 | 9.703142406 | 2.274638603 | 5.15599E−05 |
| 145 | 9.51453E−05 | 11.14069809 | 0.48630911 | 4.83954E−05 |
| 146 | 0.000114282 | 13.08917895 | 0.558357566 | 4.28532E−05 |
| 147 | 0.000384603 | 13.70605295 | 1.166574302 | 6.50063E−05 |
| 148 | 0.013888653 | 26.72467333 | 5.713633843 | 0.000249234 |
| 149 | 0.000207884 | 11.40019829 | 0.497636704 | 0.000101384 |
| 150 | 0.072692591 | 21.22816259 | 4.644215946 | 0.001979696 |
| 151 | 9.13848E−05 | 8.451083744 | 0.598290911 | 4.90765E−05 |
| 152 | 0.000194321 | 18.91961982 | 0.686929876 | 4.05995E−05 |
| 153 | 0.000147665 | 13.39406509 | 0.598290911 | 4.97643E−05 |
| 154 | 5.96976E−05 | 12.21553255 | 0.313987533 | 4.2448E−05 |
| 155 | 0.000304364 | 10.39710441 | 1.64783 | 4.72171E−05 |
| 156 | 0.000232098 | 14.02530793 | 0.736058624 | 6.09429E−05 |
| 157 | 4.49655E−05 | 9.055499382 | 0.321301243 | 4.26164E−05 |
| 158 | 0.001052342 | 14.02530793 | 2.672467333 | 7.64658E−05 |
| 159 | 0.002645292 | 15.73665433 | 2.734717094 | 0.000166845 |
| 160 | 0.019386533 | 18.06809666 | 27.98416838 | 0.000104775 |
| 161 | 0.000112838 | 32.13012427 | 0.255218649 | 3.72481E−05 |
| 162 | 0.419893137 | 15.73665433 | 21.72263001 | 0.003405842 |
| 163 | 0.000458265 | 14.68630033 | 2.074495061 | 4.12016E−05 |
| 164 | 0.054611893 | 10.16043742 | 2.611634549 | 0.005646639 |
| 165 | 5.99504E−05 | 19.36031438 | 0.189196198 | 4.45628E−05 |
| 166 | 0.001318468 | 16.4783 | 1.063928408 | 0.000205305 |
| 167 | 0.002095732 | 11.93747308 | 2.734717094 | 0.000173505 |
| 168 | 0.000184796 | 16.1032081 | 0.395286885 | 8.01508E−05 |
| 169 | 0.000275482 | 16.86212891 | 0.884937105 | 4.99016E−05 |
| 170 | 0.000167236 | 12.79123286 | 0.321301243 | 0.000110242 |
| 171 | 0.000342173 | 8.451083744 | 1.981127403 | 5.5619E−05 |
| 172 | 8.79781E−05 | 10.39710441 | 0.509228152 | 4.60152E−05 |
| 173 | 0.000211548 | 12.50006885 | 0.992915763 | 4.64314E−05 |
| 174 | 0.032232237 | 18.91961982 | 24.94091632 | 0.00018851 |
| 175 | 6.05564E−05 | 10.39710441 | 0.395286885 | 4.00369E−05 |
| 176 | 0.000998841 | 15.37844434 | 2.222861507 | 7.93173E−05 |
| 177 | 0.000264653 | 7.193038838 | 1.765681657 | 5.59102E−05 |
| 178 | 0.000139596 | 9.482271919 | 0.261163455 | 0.000152375 |
| 179 | 0.000296116 | 21.22816259 | 0.970314241 | 3.91975E−05 |
| 180 | 0.000327858 | 13.08917895 | 0.807072232 | 8.48754E−05 |
| 181 | 0.000152819 | 34.42804843 | 0.306840305 | 3.93781E−05 |
| 182 | 0.098588371 | 16.4783 | 23.27621742 | 0.000703772 |
| 183 | 5.50708E−05 | 10.16043742 | 0.344280484 | 4.24145E−05 |
| 184 | 0.000330822 | 15.02838821 | 0.598290911 | 9.79903E−05 |
| 185 | 0.001918516 | 11.40019829 | 10.63928408 | 4.24955E−05 |
| 186 | 0.017374938 | 24.94091632 | 3.442804843 | 0.000549449 |
| 187 | 0.079255802 | 9.055499382 | 2.222861507 | 0.010928806 |
| 188 | 7.19099E−05 | 13.70605295 | 0.313987533 | 4.57906E−05 |
| 189 | 0.002203253 | 14.02530793 | 2.274638603 | 0.000187553 |
| 190 | 0.000119875 | 6.869298762 | 1.221553255 | 3.8427E−05 |
| 191 | 7.12456E−05 | 11.66574302 | 0.395286885 | 4.19525E−05 |
| 192 | 4.19024E−05 | 11.66574302 | 0.184889567 | 5.21066E−05 |
| 193 | 0.466489514 | 24.37319175 | 3.862890569 | 0.013431024 |
| 194 | 3.82148E−05 | 10.16043742 | 0.286360034 | 3.59508E−05 |
| 195 | 0.070447558 | 16.4783 | 3.068403046 | 0.003829724 |
| 196 | 0.003421942 | 15.37844434 | 7.360586237 | 8.21109E−05 |
| 197 | 0.001734764 | 16.86212891 | 4.235575283 | 6.57536E−05 |
| 198 | 7.34401E−05 | 13.39406509 | 0.433423451 | 3.46408E−05 |
| 199 | 0.055210676 | 21.22816259 | 19.81127403 | 0.00035693 |
| 200 | 0.001170004 | 20.27273789 | 1.039710441 | 0.000150667 |
| 201 | 0.010369934 | 19.81127403 | 0.970314241 | 0.001476792 |
| 202 | 9.92438E−05 | 9.929157627 | 0.453850068 | 6.05564E−05 |
| 203 | 0.004408103 | 15.02838821 | 4.752393632 | 0.000167575 |
| 204 | 0.000153088 | 12.50006885 | 0.533227336 | 6.29582E−05 |
| 205 | 0.707008218 | 12.79123286 | 4.235575283 | 0.036236842 |
| 206 | 0.000782934 | 20.74495061 | 1.308917895 | 7.86962E−05 |
| 207 | 0.00011326 | 15.02838821 | 0.433423451 | 4.65875E−05 |
| 208 | 0.001393141 | 14.35199932 | 4.334234505 | 6.15443E−05 |
| 209 | 0.001849097 | 14.35199932 | 5.092281523 | 6.92015E−05 |
| 210 | 0.000271964 | 9.055499382 | 1.936031438 | 4.21008E−05 |
| 211 | 0.001399652 | 9.703142406 | 2.672467333 | 0.000146581 |
| 212 | 4.64163E−05 | 9.266429059 | 0.377496044 | 3.67224E−05 |
| 213 | 8.55306E−05 | 25.52186489 | 0.243731918 | 3.79314E−05 |
| 214 | 0.000156546 | 5.98290911 | 2.027273789 | 3.50463E−05 |
| 215 | 7.72511E−05 | 11.14069809 | 0.433423451 | 4.31182E−05 |
| 216 | 0.002519187 | 11.93747308 | 8.451083744 | 6.70433E−05 |
| 217 | 0.001880782 | 22.74638603 | 5.583575658 | 3.99758E−05 |
| 218 | 0.001112268 | 20.74495061 | 4.235575283 | 3.4321E−05 |
| 219 | 0.000864187 | 20.74495061 | 2.672467333 | 4.29883E−05 |
| 220 | 0.001042542 | 23.27621742 | 2.86360034 | 4.24353E−05 |
| 221 | 1.36926E−05 | 11.66574302 | 0.078870103 | 4.02562E−05 |
| 222 | 0.000575915 | 14.68630033 | 1.370605295 | 7.6655E−05 |
| 223 | 0.000671987 | 12.21553255 | 2.027273789 | 7.3438E−05 |
| 224 | 0.00481335 | 18.06809666 | 3.139875335 | 0.000230241 |
| 225 | 0.012382803 | 22.74638603 | 4.139161818 | 0.000357102 |
| 226 | 0.000433317 | 16.86212891 | 0.612226897 | 0.000113075 |
| 227 | 0.000137795 | 11.14069809 | 0.475239363 | 7.06695E−05 |
| 228 | 9.3886E−05 | 10.63928408 | 0.475239363 | 4.97657E−05 |
| 229 | 0.000313999 | 8.258713592 | 2.494091632 | 4.15932E−05 |
| 230 | 0.000210483 | 7.532036315 | 1.088710484 | 6.96074E−05 |
| 231 | 0.000114812 | 11.93747308 | 0.545647796 | 4.8006E−05 |
| 232 | 0.002931611 | 13.39406509 | 2.437319175 | 0.000245254 |
| 233 | 6.24704E−05 | 18.4889567 | 0.249409163 | 3.67897E−05 |
| 234 | 0.000224071 | 25.52186489 | 0.545647796 | 4.29359E−05 |
| 235 | 0.000140232 | 15.37844434 | 0.598290911 | 4.14082E−05 |
| 236 | 4.47327E−05 | 11.14069809 | 0.238183902 | 4.59548E−05 |
| 237 | 3.15174E−05 | 14.35199932 | 0.172548984 | 3.4879E−05 |
| 238 | 0.00185966 | 24.94091632 | 2.998557666 | 6.71063E−05 |
| 239 | 0.000178064 | 9.929157627 | 1.250006885 | 3.92323E−05 |
| 240 | 0.000131112 | 28.6360034 | 0.243731918 | 5.0291E−05 |
| 241 | 0.077185871 | 14.68630033 | 27.98416838 | 0.000509888 |
| 242 | 0.002460055 | 12.21553255 | 1.981127403 | 0.000276036 |
| 243 | 0.000266501 | 20.74495061 | 0.864793477 | 4.07598E−05 |
| 244 | 0.000595339 | 17.25489835 | 1.279123286 | 7.22179E−05 |
| 245 | 7.95906E−05 | 23.27621742 | 0.207449506 | 4.47518E−05 |
| 246 | 0.005975783 | 15.37844434 | 3.2878531 | 0.000318703 |
| 247 | 0.002012702 | 11.93747308 | 6.869298762 | 6.71892E−05 |
| 248 | 0.000702835 | 14.02530793 | 2.552186489 | 5.23388E−05 |
| 249 | 0.053096317 | 12.79123286 | 20.74495061 | 0.00054322 |
| 250 | 0.002184807 | 22.74638603 | 4.235575283 | 6.0935E−05 |
| 251 | 0.000338308 | 11.93747308 | 1.573665433 | 4.86469E−05 |
| 252 | 0.000244172 | 11.14069809 | 0.719303884 | 8.35599E−05 |
| 253 | 0.017365732 | 23.27621742 | 3.213012427 | 0.000631947 |
| 254 | 0.000381754 | 13.08917895 | 1.039710441 | 7.64048E−05 |
| 255 | 0.000239664 | 16.1032081 | 0.545647796 | 7.52696E−05 |
| 256 | 0.000165229 | 13.70605295 | 0.533227336 | 6.1892E−05 |
| 257 | 0.572826298 | 17.25489835 | 2.274638603 | 0.039630115 |
| 258 | 0.000443714 | 15.02838821 | 0.992915763 | 7.97373E−05 |
| 259 | 0.000717834 | 19.36031438 | 1.936031438 | 5.12357E−05 |
| 260 | 0.00035004 | 11.66574302 | 0.992915763 | 8.13609E−05 |
| 261 | 0.003980082 | 21.22816259 | 4.644215946 | 0.000109751 |
| 262 | 0.004494006 | 13.08917895 | 2.074495061 | 0.000452661 |
| 263 | 0.00032321 | 33.64437037 | 0.306840305 | 8.49517E−05 |
| 264 | 0.000597681 | 15.37844434 | 0.736058624 | 0.000141442 |
| 265 | 0.083606849 | 23.27621742 | 4.435191796 | 0.002199125 |
| 266 | 0.000248454 | 6.869298762 | 2.274638603 | 4.28948E−05 |
| 267 | 0.003448544 | 15.02838821 | 2.798416838 | 0.000221445 |
| 268 | 0.230806121 | 14.35199932 | 2.274638603 | 0.019197571 |
| 269 | 0.005793992 | 28.6360034 | 4.235575283 | 0.000132201 |
| 270 | 0.000141299 | 15.37844434 | 0.44351918 | 5.65689E−05 |
| 271 | 0.007550977 | 19.36031438 | 2.027273789 | 0.000522164 |
| 272 | 0.028153555 | 10.639284082 | 0.27273789 | 0.000349045 |
| 273 | 8.07637E−05 | 11.40019829 | 0.321301243 | 5.95633E−05 |
| 274 | 0.00237182 | 11.66574302 | 2.074495061 | 0.000260883 |
| 275 | 0.062347981 | 8.258713592 | 2.734717094 | 0.007492655 |
| 276 | 0.003912558 | 21.22816259 | 4.334234505 | 0.000116891 |
| 277 | 3.27487E−05 | 13.70605295 | 0.168621289 | 3.88351E−05 |
| 278 | 0.000180456 | 14.35199932 | 0.238183902 | 0.000140977 |
| 279 | 0.083163946 | 16.862128913 | 7.74960444 | 0.000355677 |
| 280 | 0.001253422 | 9.055499382 | 0.788701025 | 0.00046667 |
| 281 | 0.000194038 | 11.93747308 | 1.140019829 | 3.91682E−05 |
| 282 | 5.68186E−05 | 17.65681657 | 0.176568166 | 5.00244E−05 |
| 283 | 0.002179164 | 13.70605295 | 1.221553255 | 0.000361179 |
| 284 | 0.010480433 | 16.86212891 | 4.976367043 | 0.000339565 |
| 285 | 0.000207057 | 13.70605295 | 0.475239363 | 8.56867E−05 |
| 286 | 0.000128927 | 10.63928408 | 0.656012939 | 4.98499E−05 |
| 287 | 0.000302888 | 16.1032081 | 0.864793477 | 5.93561E−05 |
| 288 | 4.6263E−05 | 10.39710441 | 0.202727379 | 5.86939E−05 |
| 289 | 0.001354597 | 13.70605295 | 3.52299807 | 7.58072E−05 |
| 290 | 0.000618642 | 8.647934772 | 2.672467333 | 7.19199E−05 |
| 291 | 0.001887329 | 18.06809666 | 1.936031438 | 0.000147404 |
| 292 | 0.0004937 | 17.25489835 | 0.753203631 | 0.000101778 |
| 293 | 0.001616446 | 29.3030216 | 3.068403046 | 4.9181E−05 |
| 294 | 0.068465492 | 12.21553255 | 6.264874929 | 0.002429746 |
| 295 | 0.000451584 | 18.06809666 | 1.016043742 | 6.58369E−05 |
| 296 | 0.004368096 | 17.25489835 | 1.166574302 | 0.000589091 |
| 297 | 0.001490968 | 13.70605295 | 2.734717094 | 0.000106171 |
| 298 | 0.028951999 | 17.65681657 | 1.279123286 | 0.003477998 |
| 299 | 0.001152281 | 11.40019829 | 3.139875335 | 8.74717E−05 |
| 300 | 0.026971311 | 14.68630033 | 2.327621742 | 0.002190423 |
| 301 | 9.6134E−05 | 16.1032081 | 0.404494299 | 4.04506E−05 |
| 302 | 0.000130133 | 15.02838821 | 0.464421595 | 5.08676E−05 |
| 303 | 0.005604023 | 10.63928408 | 3.364437037 | 0.000434532 |
| 304 | 0.000421245 | 14.02530793 | 2.027273789 | 4.08524E−05 |
| 305 | 0.001977786 | 21.22816259 | 5.583575658 | 4.52103E−05 |
| 306 | 0.002425573 | 18.06809666 | 5.846721472 | 6.16713E−05 |
| 307 | 0.000624884 | 15.73665433 | 1.250006885 | 8.71442E−05 |
| 308 | 0.000333609 | 6.869298762 | 2.327621742 | 5.60145E−05 |
| 309 | 0.000142043 | 11.66574302 | 0.598290911 | 5.41275E−05 |
| 310 | 0.000325791 | 12.21553255 | 1.84889567 | 3.96374E−05 |
| 311 | 0.000551644 | 15.73665433 | 0.992915763 | 9.51103E−05 |
| 312 | 0.000100483 | 16.86212891 | 0.404494299 | 3.9605E−05 |
| 313 | 5.66848E−05 | 13.08917895 | 0.267246733 | 4.48192E−05 |
| 314 | 7.52759E−05 | 11.66574302 | 0.453850068 | 3.89212E−05 |
| 315 | 0.000315848 | 7.029305285 | 3.213012427 | 3.73045E−05 |
| 316 | 0.001489085 | 11.14069809 | 3.52299807 | 0.000101478 |
| 317 | 0.000160787 | 12.79123286 | 0.948227192 | 3.61294E−05 |
| 318 | 7.65189E−05 | 16.86212891 | 0.336443704 | 3.62734E−05 |
| 319 | 6.90281E−05 | 16.4783 | 0.255218649 | 4.45683E−05 |
| 320 | 4.75538E−05 | 8.647934772 | 0.404494299 | 3.71925E−05 |
| 321 | 0.000355948 | 16.86212891 | 1.308917895 | 4.29815E−05 |
| 322 | 0.000202312 | 10.39710441 | 1.502838821 | 3.53275E−05 |
| 323 | 0.227356053 | 12.79123286 | 36.05059237 | 0.001327589 |
| 324 | 9.01036E−05 | 14.02530793 | 0.395286885 | 4.48419E−05 |
| 325 | 0.000225325 | 15.73665433 | 0.612226897 | 6.36963E−05 |
| 326 | 0.004941774 | 20.74495061 | 2.998557666 | 0.000216414 |
| 327 | 0.01326492 | 12.21553255 | 2.027273789 | 0.00142922 |
| 328 | 0.003718088 | 23.81839017 | 3.689031854 | 0.000113968 |
| 329 | 0.004167344 | 15.37844434 | 0.884937105 | 0.000832679 |
| 330 | 0.000131618 | 11.14069809 | 0.558357566 | 5.63909E−05 |
| 331 | 4.56581E−05 | 9.482271919 | 0.255218649 | 5.12428E−05 |
| 332 | 7.20774E−05 | 12.50006885 | 0.352299807 | 4.45916E−05 |
| 333 | 0.034758616 | 10.63928408 | 2.734717094 | 0.003243739 |
| 334 | 0.001279068 | 16.1032081 | 1.339406509 | 0.000164095 |
| 335 | 0.0067709 | 15.37844434 | 10.16043742 | 0.000117995 |
| 336 | 0.000241151 | 9.266429059 | 1.806809666 | 3.87283E−05 |
| 337 | 0.000881043 | 11.93747308 | 2.027273789 | 9.85572E−05 |
| 338 | 0.001402766 | 22.74638603 | 2.222861507 | 7.59423E−05 |
| 339 | 0.000155937 | 17.25489835 | 0.584672147 | 4.12205E−05 |
| 340 | 0.000102855 | 26.72467333 | 0.286360034 | 3.63759E−05 |
| 341 | 0.029541969 | 16.4783 | 6.122268966 | 0.000795475 |
| 342 | 0.010547896 | 9.055499382 | 32.13012427 | 9.92001E−05 |
| 343 | 0.00104485 | 12.50006885 | 3.139875335 | 7.3512E−05 |
| 344 | 0.003614546 | 8.84937105 | 2.274638603 | 0.000497764 |
| 345 | 0.001856153 | 15.73665433 | 2.86360034 | 0.000112033 |
| 346 | 0.000199744 | 8.451083744 | 1.61032081 | 3.99152E−05 |
| 347 | 3.08138E−05 | 8.647934772 | 0.255218649 | 3.76999E−05 |
| 348 | 0.000222023 | 9.703142406 | 1.250006885 | 5.02243E−05 |
| 349 | 8.82657E−05 | 11.66574302 | 0.453850068 | 4.50325E−05 |
| 350 | 2.57735E−05 | 10.88710484 | 0.172548984 | 3.69963E−05 |
| 351 | 4.03044E−05 | 13.39406509 | 0.19811274 | 4.13067E−05 |
| 352 | 0.004566689 | 9.482271919 | 3.605059237 | 0.000362474 |
| 353 | 0.001055758 | 13.08917895 | 5.210895997 | 4.20808E−05 |
| 354 | 3.05164E−05 | 10.88710484 | 0.2172263 | 3.53289E−05 |
| 355 | 0.002585554 | 27.34717094 | 2.998557666 | 8.70808E−05 |
| 356 | 0.000139406 | 12.21553255 | 0.702930528 | 4.36022E−05 |
| 357 | 0.003081322 | 22.22861507 | 2.327621742 | 0.000163677 |
| 358 | 0.000205076 | 14.68630033 | 0.558357566 | 6.72774E−05 |
| 359 | 0.000146209 | 33.64437037 | 0.32878531 | 3.61733E−05 |
| 360 | 0.012689615 | 12.21553255 | 25.52186489 | 0.000112607 |
| 361 | 0.004583891 | 16.4783 | 4.752393632 | 0.000158805 |
| 362 | 0.000214841 | 7.360586237 | 1.468630033 | 5.37078E−05 |
| 363 | 0.007450718 | 18.91961982 | 2.494091632 | 0.000428744 |
| 364 | 0.106193293 | 10.88710484 | 3.364437037 | 0.008050725 |
| 365 | 6.36614E−05 | 12.50006885 | 0.368903185 | 3.78588E−05 |
| 366 | 3.36424E−05 | 15.02838821 | 0.157366543 | 3.92244E−05 |
| 367 | 6.81265E−05 | 10.63928408 | 0.453850068 | 3.83103E−05 |
| 368 | 6.02667E−05 | 10.16043742 | 0.344280484 | 4.64704E−05 |
| 369 | 0.015366884 | 10.88710484 | 2.93030216 | 0.001306252 |
| 370 | 0.041789394 | 19.36031438 | 25.52186489 | 0.000230784 |
| 371 | 0.000222478 | 15.73665433 | 0.864793477 | 4.34986E−05 |
| 372 | 0.005150502 | 17.25489835 | 2.494091632 | 0.000326126 |
| 373 | 8.00509E−05 | 9.482271919 | 0.360505924 | 6.48627E−05 |
| 374 | 6.63686E−05 | 22.22861507 | 0.212281626 | 3.81911E−05 |
| 375 | 7.50907E−05 | 12.21553255 | 0.44351918 | 3.70893E−05 |
| 376 | 0.001539591 | 13.39406509 | 1.468630033 | 0.000212993 |
| 377 | 0.130153448 | 18.4889567 | 29.3030216 | 0.000651829 |
| 378 | 0.012114767 | 18.06809666 | 0.992915763 | 0.001833678 |
| 379 | 7.85619E−05 | 10.63928408 | 0.413916182 | 4.87707E−05 |
| 380 | 0.001795076 | 16.86212891 | 3.2878531 | 8.70516E−05 |
| 381 | 0.000130478 | 8.451083744 | 1.039710441 | 4.08208E−05 |
| 382 | 0.00011804 | 7.029305285 | 1.114069809 | 4.04629E−05 |
| 383 | 0.001199255 | 11.14069809 | 0.864793477 | 0.000337446 |
| 384 | 0.00076988 | 16.4783 | 1.537844434 | 8.24444E−05 |
| 385 | 0.000328129 | 11.66574302 | 1.402530793 | 5.43864E−05 |
| 386 | 0.001878249 | 23.27621742 | 1.806809666 | 0.000121176 |
| 387 | 0.000949237 | 22.74638603 | 0.948227192 | 0.000119569 |
| 388 | 0.000322352 | 11.93747308 | 0.686929876 | 0.000108257 |
| 389 | 9.70649E−05 | 10.88710484 | 0.686929876 | 3.58878E−05 |
| 390 | 5.56156E−05 | 21.22816259 | 0.184889567 | 3.84766E−05 |
| 391 | 0.000301138 | 14.02530793 | 0.825871359 | 7.01035E−05 |
| 392 | 0.00023197 | 19.36031438 | 0.464421595 | 6.96021E−05 |
| 393 | 0.086167577 | 13.08917895 | 42.35575283 | 0.000428099 |
| 394 | 0.00320585 | 20.74495061 | 4.752393632 | 8.8303E−05 |
| 395 | 0.000356753 | 14.02530793 | 1.140019829 | 6.04461E−05 |
| 396 | 0.003535662 | 11.66574302 | 2.611634549 | 0.000315439 |
| 397 | 0.00014032 | 16.4783 | 0.386289057 | 5.92625E−05 |
| 398 | 0.004866363 | 12.50006885 | 14.68630033 | 7.28681E−05 |
| 399 | 0.000158366 | 23.81839017 | 0.273471709 | 6.59099E−05 |
| 400 | 0.001939939 | 8.647934772 | 3.2878531 | 0.000185328 |
| 401 | 0.074518819 | 16.1032081 | 1.936031438 | 0.006598619 |
| 402 | 0.000368539 | 16.4783 | 0.970314241 | 6.18047E−05 |
| 403 | 0.00019918 | 8.070722319 | 1.725489835 | 3.91329E−05 |
| 404 | 0.0023339 | 14.35199932 | 3.52299807 | 0.000125363 |
| 405 | 0.000307937 | 10.16043742 | 2.074495061 | 3.99055E−05 |
| 406 | 4.35479E−05 | 8.070722319 | 0.344280484 | 4.25484E−05 |
| 407 | 0.009636643 | 10.63928408 | 15.37844434 | 0.000162331 |
| 408 | 0.000704922 | 12.79123286 | 1.64783 | 9.09555E−05 |
| 409 | 0.082073394 | 13.39406509 | 3.139875335 | 0.005307281 |
| 410 | 0.000172874 | 11.14069809 | 0.612226897 | 6.78625E−05 |
| 411 | 0.002590415 | 20.74495061 | 5.713633843 | 5.95983E−05 |
| 412 | 2.14123E−05 | 10.16043742 | 0.114001983 | 5.01741E−05 |
| 413 | 1.79079E−05 | 12.50006885 | 0.103971044 | 3.74308E−05 |
| 414 | 0.015229974 | 16.4783 | 7.532036315 | 0.000340591 |
| 415 | 0.001564252 | 5.456477959 | 2.93030216 | 0.000265267 |
| 416 | 7.42737E−05 | 24.94091632 | 0.232762174 | 3.46397E−05 |
| 417 | 0.002017239 | 12.50006885 | 2.437319175 | 0.000179922 |
| 418 | 0.001073996 | 14.02530793 | 3.2878531 | 6.32416E−05 |
| 419 | 0.000103914 | 24.37319175 | 0.321301243 | 3.60307E−05 |
| 420 | 0.00227239 | 15.02838821 | 5.210895997 | 7.79872E−05 |
| 421 | 0.003094582 | 17.65681657 | 5.846721472 | 8.01705E−05 |
| 422 | 0.026822594 | 11.14069809 | 24.37319175 | 0.000263402 |
| 423 | 8.06153E−05 | 17.25489835 | 0.321301243 | 3.90039E−05 |
| 424 | 6.65435E−05 | 15.02838821 | 0.313987533 | 3.80554E−05 |
| 425 | 8.68244E−05 | 12.50006885 | 0.413916182 | 4.61813E−05 |
| 426 | 5.02296E−05 | 9.482271919 | 0.377496044 | 3.7914E−05 |
| 427 | 0.005633169 | 13.39406509 | 15.73665433 | 7.26803E−05 |
| 428 | 0.053561311 | 10.88710484 | 2.611634549 | 0.005001157 |
| 429 | 0.000211193 | 7.360586237 | 1.981127403 | 3.98133E−05 |
| 430 | 0.128441705 | 12.50006885 | 15.02838821 | 0.001895798 |
| 431 | 0.00032307 | 9.482271919 | 1.537844434 | 6.04888E−05 |
| 432 | 0.010134136 | 23.81839017 | 16.4783 | 6.92222E−05 |
| 433 | 7.69896E−05 | 13.70605295 | 0.377496044 | 4.06321E−05 |
| 434 | 0.000135597 | 22.22861507 | 0.377496044 | 4.37181E−05 |
| 435 | 0.001444653 | 14.68630033 | 4.644215946 | 5.67292E−05 |
| 436 | 8.44475E−05 | 14.02530793 | 0.336443704 | 4.85387E−05 |
| 437 | 0.000172682 | 15.02838821 | 0.788701025 | 4.02947E−05 |
| 438 | 0.043302564 | 22.22861507 | 4.334234505 | 0.001237471 |
| 439 | 0.00083712 | 19.81127403 | 1.140019829 | 0.000100867 |
| 440 | 0.110359565 | 17.25489835 | 23.81839017 | 0.000713841 |
| 441 | 0.00239921 | 15.02838821 | 3.139875335 | 0.000138022 |
| 442 | 5.51714E−05 | 11.40019829 | 0.299855767 | 4.43098E−05 |
| 443 | 2.73416E−05 | 13.70605295 | 0.119374731 | 4.57706E−05 |
| 444 | 7.76194E−05 | 13.39406509 | 0.32878531 | 4.81237E−05 |
| 445 | 0.01841864 | 18.06809666 | 8.451083744 | 0.000326235 |
| 446 | 0.00091319 | 13.70605295 | 1.435199932 | 0.00012658 |
| 447 | 0.005087454 | 18.06809666 | 4.538500684 | 0.000169647 |
| 448 | 0.001545552 | 16.86212891 | 0.970314241 | 0.000258749 |
| 449 | 0.000120989 | 10.39710441 | 0.584672147 | 5.2939E−05 |
| 450 | 0.000949163 | 15.73665433 | 2.222861507 | 7.37358E−05 |
| 451 | 0.003519884 | 15.37844434 | 6.869298762 | 9.09167E−05 |
| 452 | 2.91528E−05 | 10.63928408 | 0.184889567 | 3.93474E−05 |
| 453 | 0.000259943 | 12.50006885 | 0.497636704 | 0.000114874 |
| 454 | 0.069613956 | 9.929157627 | 4.044942993 | 0.004814647 |
| 455 | 0.011539164 | 13.39406509 | 8.84937105 | 0.000266971 |
| 456 | 0.000245616 | 15.37844434 | 0.992915763 | 4.32175E−05 |
| 457 | 0.064510667 | 18.91961982 | 27.98416838 | 0.000328666 |
| 458 | 0.019758322 | 16.1032081 | 38.62890569 | 8.50784E−05 |
| 459 | 0.000992578 | 10.39710441 | 0.926642906 | 0.000279497 |
| 460 | 0.000162264 | 13.70605295 | 0.377496044 | 8.49288E−05 |
| 461 | 8.60808E−05 | 14.68630033 | 0.395286885 | 3.95986E−05 |
| 462 | 0.000100838 | 10.16043742 | 0.5210896 | 5.101E−05 |
| 463 | 0.026273224 | 22.74638603 | 6.712934432 | 0.000467224 |
| 464 | 0.003758225 | 13.70605295 | 3.52299807 | 0.000209698 |
| 465 | 0.000251714 | 14.02530793 | 0.948227192 | 5.16242E−05 |
| 466 | 0.210714099 | 20.74495061 | 15.37844434 | 0.001793468 |
| 467 | 0.015124482 | 16.86212891 | 18.4889567 | 0.000130494 |
| 468 | 0.001275927 | 18.91961982 | 2.381839017 | 7.7579E−05 |
| 469 | 0.005514392 | 20.74495061 | 2.494091632 | 0.000288274 |
| 470 | 0.156586151 | 18.4889567 | 6.410802613 | 0.003538119 |
| 471 | 0.186229111 | 14.35199932 | 2.998557666 | 0.011991882 |
| 472 | 0.042285785 | 28.6360034 | 5.210895997 | 0.000773999 |
| 473 | 0.650258534 | 12.21553255 | 44.35191796 | 0.003257705 |
| 474 | 0.144329762 | 25.52186489 | 5.210895997 | 0.002904785 |
| 475 | 0.002158857 | 16.4783 | 0.184889567 | 0.001965935 |
| 476 | 0.006971615 | 20.27273789 | 2.86360034 | 0.000330172 |
| 477 | 0.00402333 | 9.929157627 | 3.774960444 | 0.00029246 |
| 478 | 0.033812192 | 17.25489835 | 5.98290911 | 0.000880456 |
| 479 | 0.00023843 | 15.02838821 | 0.249409163 | 0.000173268 |
| 480 | 0.001645208 | 19.36031438 | 1.308917895 | 0.000179905 |
| 481 | 0.0484191 | 11.93747308 | 7.532036315 | 0.001430588 |
| 482 | 9.55314E−05 | 18.4889567 | 0.184889567 | 7.59792E−05 |
| 483 | 0.041845605 | 11.93747308 | 9.703142406 | 0.000984742 |
| 484 | 0.019450519 | 19.81127403 | 5.456477959 | 0.000480395 |
| 485 | 0.026711018 | 8.647934772 | 2.798416838 | 0.002995786 |
| 486 | 0.002357911 | 18.4889567 | 2.437319175 | 0.000142909 |
| 487 | 0.421294865 | 33.64437037 | 25.52186489 | 0.001344337 |
| 488 | 0.025919091 | 16.1032081 | 30.68403046 | 0.000141309 |
| 489 | 0.00481277 | 27.34717094 | 0.433423451 | 0.001102531 |
| 490 | 0.005726208 | 9.266429059 | 5.98290911 | 0.000280416 |
| 491 | 0.016151725 | 15.37844434 | 3.862890569 | 0.000738517 |
| 492 | 0.000487614 | 7.360586237 | 3.442804843 | 5.22113E−05 |
| 493 | 0.061733956 | 29.3030216 | 6.410802613 | 0.000885952 |
| 494 | 0.001663264 | 19.81127403 | 1.502838821 | 0.000152943 |
| 495 | 0.066165089 | 11.40019829 | 19.81127403 | 0.000798045 |
| 496 | 0.014395555 | 15.37844434 | 14.68630033 | 0.000170788 |
| 497 | 0.009138115 | 16.4783 | 2.381839017 | 0.000638927 |
| 498 | 0.105623599 | 15.02838821 | 7.029305285 | 0.002777924 |
| 499 | 0.000110394 | 28.6360034 | 0.279841684 | 3.7797E−05 |
| 500 | 0.044368613 | 9.703142406 | 24.37319175 | 0.000512563 |
| 501 | 0.092445553 | 13.39406509 | 27.34717094 | 0.000694007 |
| 502 | 0.24858678 | 10.39710441 | 4.235575283 | 0.015327737 |
| 503 | 0.000134276 | 11.40019829 | 0.509228152 | 6.18108E−05 |
| 504 | 0.003680974 | 26.11634549 | 3.862890569 | 9.72953E−05 |

TABLE 2
Genes expressed predominately in the Retinal Ganglion Cell
Layer (RGL). Genes expressed at least at 10 fold higher
levels in the GCL than in other parts of the retina, as
identified both by SAM and t-test, and grouped by putative function.
Promoter sequences belonging to any of these genes would in
drive high and preferential gene expression in GCL
and may hence be utilised to drive expression of OphNDI1
contemplated in this patent application. In addition, additional
genes expresses in addition to OphNDI1 such as those
described in Table 6 may be expressed from any of these promoters.
Table adapted from Kim et al., Mol Vis 2006; 12:1640-1646

| Transcriptional regulation and RNA | |
|---|---|
| binding molecules | ECM organisation |
| EBF | CTHRC1 |
| ERF5A2 | LAMA4 |
| ELAVL2 | SERPINE2 |
| ELAVL4 | Neuronal development |
| FKBP1B | CRTAC1 |
| KIAA1045 | GAP43 |
| POU4F1 | NRG1 |
| RBPMS | NRN1 |
| RBPMS2 | Fatty acid metabolism |
| TGFB1I1 | FABP3 |
| Cytoskeleton/Neurofilaments | LSS |
| EPPK1 | Signal transduction |
| KEF5A | GPR54 |
| MAP1A | RGS1 |
| MICAL2 | RGS5 |
| NEF3 | RIT2 |
| NEFH | Apoptosis |
| NEFL | IER3 |
| PRPH | LGALS1 |
| TMSB10 | TNFRSF21 |
| Endocytosis/neurotransmitter | Miscellaneous |
| transport/synaptic transmission | |
| ANXA2 | GGH |
| AP1G1 | HBA2 |
| CHRNB3 | HHL |
| CPLX1 | HLA-DPA1 |
| GNAS | LMO2 |
| QPRT | MT3 |
| RAB13 | PECAM1 |
| STMN2 | PPP2R2C |
| STXBP6 | UCHL1 |
| SYNGR3 | Cell adhesion |
| Ion/Anion transport | FAT3 |
| ATP1B1 | FN1 |
| KCNA2 | GJA1 |
| KCNJ8 | PCDH7 |
| SCN1A | SRPX |
| SCN1B | THY1 |
| SCN4B | |
| SLC17A6 | |
| SLC4A11 | |
| GABRB3 | |

TABLE 3
Transcripts detected at very high levels by gene array analyses
of the human retinal ganglion cell layer (GCL). The genes listed
here are likely to represent highly abundant
transcripts of the ganglion cell layer. Promoter
sequences belonging to any of these genes
would in theory drive very high levels of gene
expression in GCL and may hence be utilised
to drive expression of OphNDI1 and the
contemplated in this patent application. In addition,
additional genes expresses in addition to
OphNDI1 such as those described in Table 6 may be
expressed from any of these promoters.
Table adapted from Kim et al., Mol Vis 2006;12:1640-1646

| | |
|---|---|
| TF | H3F3A |
| TUBA3 | COX7A2 |
| NEFH | RTN1 |
| GABARAPL3 | CALM2 |
| TUBB | MAFF |
| GLUL | INA |
| UBB | PGK1 |
| NEFL | AF1Q |
| EIF3S6IP | YWHAB |
| PGAM1 | SUI1 |
| LDHA | DDAH1 |
| RTN4 | EIF4A2 |
| HINT1 | MAP1B |
| LDHB | NDUFB8 |
| PGR1 | K-ALPHA-1 |
| EEF1A1 | STK35 |
| PTPRO | NEF3 |
| SNAP25 | TMSB10 |
| FTH1 | DRLM |
| EEF1D | MGC14697 |
| SKP1A | FTL |
| BEX1 | CSRP2 |
| HSPA8 | SRP14 |
| PCP4 | CYCS |
| PARK7 | BNIP3 |
| MAP4 | LAMP1 |
| ACTG1 | WIF1 |
| CDIPT | MDH1 |
| VAMP1 | NARS |
| SMT3H2 | OAZ1 |
| EEF1G | STOM |
| COX5A | GNAS |
| SPARCL1 | NGFRAP1 |
| UBC | DBI |
| KARS | TSC22 |
| C6orf53 | ATP6V0E |
| VEGF | FDFT1 |
| COX4I1 | SAT |
| STMN2 | ATP5A1 |
| NPM1 | MTCH1 |
| APP | HIG1 |
| CIRBP | GPX3 |
| B2M | CFL1 |
| DP1 | MYL6 |
| LAPTM4B | SNCG |

TABLE 4
Exemplary universal promoters, inducible/conditional promoters,
enhancer elements and epigenetic elements

| Promoters | Reference |
|---|---|
| chicken β-actin promoter | Miyazaki et al., Gene. 1989 |
| | July 15; 79(2):269-77. |
| SV40 promoter | Byrne et al., Proc Natl Acad |
| | Sci USA. 1983 |
| | February; 80(3):721-5. |
| CMV promoter | Thomsen et al., Proc Natl |
| | Acad Sci USA. 1984 |
| | February; 81(3):659-63. |
| | Schmidt et al., Mol Cell. Biol. |
| | August 1990 vol.10 no.8 |
| | 4406-4411. |
| | Furth et al., Nucl Acids Res. |
| | (1991) 19(22):6205-6208. |
| Ubiquitin promoter | Schorpp et al., Nucl. Acids |
| | Res. (1996) 24 (9):1787- |
| | 1788. |
| PGK promoter | McBurney et al., Dev Dyn. |
| | August 1994; 200(4):278-93. |
| Inducible Promoters | Reference |
| tetR | Steiger et al., 2007 |
| Enhancer Element | Reference |
| Chicken ovalbumin upstream | Eguchi et al., Biochimie |
| promoter transcription factor II | 89(3):278-88, 2007 |
| Mouse dystrophin muscle | Anderson et al., Mol. Ther. |
| promoter/enhancer | 14(5):724-34, 2006 |
| Tobacco eIF4A-10 | Tian et al., J. Plant Physiol. |
| promoter elements | 162(12):1355-66, 2005 |
| Immunoglobulin (Ig) | Frezza et al., Ann. Rheum. |
| enhancer element HS1, 2A | Dis. Mar. 28, 2007 |
| Col9a1 enhancer element | Genzer and Bridgewater |
| | Nucleic Acids Res. |
| | 35(4):1178-86, 2007 |
| Gata2 intronic enhancer | Khandekar et al., |
| | Development Mar. 29, 2007 |
| TH promoter enhancer | Gao et al., Brain Res. |
| | 1130(1):1-16, 2007 |
| CMV enhancer | InvivoGen cat# pdrive-cag |
| | 05A13-SV |
| Woodchuck hepatitis virus | Donello et al., J. Virol. |
| posttranscriptional | 72(6):5085-92, 1998 |
| regulatory element | |
| Woodchuck hepatitis virus | Schambach et al., Gene Ther. |
| posttranscriptional | 13(7):641-5, 2006 |
| regulatory element | |
| IRBP | Ying et al., Curr. Eye Res. |
| | 17(8):777-82, 1998 |
| CMV enhancer and | InvivoGen cat# pdrive-cag |
| chicken β-actin promoter | 05A13-SV |
| CMV enhancer and chicken | InvivoGen cat# pdrive-cag |
| β-actin promoter and 5'UTR | 05A13-SV |
| CpG-island | Antoniou et al., Genomics |
| | 82:269-279, 2003 |
| Epigenetic elements | Reference |
| Mcp Insulators | Kyrchanova et al., Mol. Cell Biol. |
| | 27(8):3035-43, 2007 |
| CpG-island region of | Williams et al., BMC Biotechnol. |
| the HNRPA2B1 locus | 5:17, 2005 |
| Chicken b-globin | Kwaks and Otte 2006 Trends in |
| 5'hypersensitive site 4 (cHS4) | Biotechnology 24:137-142 |
| Ubiquitous chromatin | Kwaks and Otte 2006 Trends in |
| opening elements (UCOEs) | Biotechnology 24:137-142 |
| Matrix associated | Kwaks and Otte 2006 Trends in |
| regions (MARs) | Biotechnology 24:137-142 |
| Stabilising and antirepressor | Kwaks and Otte 2006 Trends in |
| elements (STAR) | Biotechnology 24:137-142 |
| Human growth | Trujillo MA et al. 2006 Mol |
| hormone gene silencer | Endocrinol 20:2559 |

TABLE 5
Exemplary Vectors
Viral Vectors

| Delivery Method | Serotype | Reference |
|---|---|---|
| AAV (ssAAV | All serotypes, | Lebkowski et al., Mol. Cell |
| or scAAV) | including | Biol. 8(10):3988-96, 1988 |
| | but not limited to | Flannery et al., Proc. Natl. |
| | 1, 2, 3, 4, 5, 6, 7, | Acad. Sci. U.S.A. |
| | 8, 9, 10, 11, 12, | 94(13):6916-21, 1997 |
| Lentivirus (for example | VSV-G | Pang et al., Mol. Vis. 12: |
| but not exclusively | Rabies-G | 756-67, 2006 |
| Feline-FIV, | Further | Takahashi Methods Mol. |
| Equine-EIAV, | serotypes** | Biol. 246:439-49, 2004 |
| Bovine-BIV | | Balaggan et al., J. Gene |
| and Simian-SIV). | | Med. 8(3):275-85, 2006 |
| Adenovirus | | Bennett et al., Nat. Med. |
| | | 2(6):649-54, 1996 |
| Simian papovirius | | Kimchi-Sarfaty et al., Hum. |
| SV40 | | Gene Ther. 13(2):299-310, |
| | | 2002 |
| Semliki Forest Virus | | DiCiommo et al., Invest. |
| | | Ophthalmol. Vis. Sco. |
| | | 45(9):3320-9, 2004 |
| Sendai Virus | | Ikeda et al., Exp. Eye Res. |
| | | 75(1):39-48, 2002 |

The list provided is not exhaustive; other viral vectors and derivatives,
natural or synthesized could be used in the invention.
Non Viral Vectors or Delivery Methods

| Delivery Method | Reference |
|---|---|
| Cationic liposomes | Sakurai et al., Gene Ther. 8(9):677-86, 2001 |
| HVJ liposomes | Hangai et al., Arch. Ophthalmol. 116(3):342-8, |
| | 1998 |
| Polyethylenimine | Liao and Yau Biotechniques 42(3):285-6, 2007 |
| DNA nanoparticles | Farjo et al., PloS ONE 1:e38, 2006 |
| Dendrimers | Marano et al., Gene Ther. 12(21):1544-50, |
| | 2005 |
| Bacterial | Brown and Giaccia Cancer Res. 58(7):1408-16, |
| | 1998 |
| Macrophages | Griffiths et al., Gene Ther. 7(3):255-62, 2000 |
| Stem cells | Hall et al., Exp. Hematol. 34(4):433-42, 2006 |
| Retinal transplant | Ng et al., Chem. Immunol. Allergy 92:300-16, |
| | 2007 |
| Marrow/Mesenchymal | Kicic et al., J. Neurosci. 23(21):7742-9, 2003 |
| stromal cells | Chng et al., J. Gene Med. 9(1):22-32, 2007 |
| Implant (e.g., | Montezuma et al., Invest. Ophthalmol. Vis. Sci. |
| Poly(imide)uncoated | 47(8):3514-22, 2006 |
| or coated) | |
| Electroporation | Featherstone A. Biotechnol. Lab. 11(8):16, |
| | 1993 |
| Targeting peptides | Trompeter et al., J. Immunol Methods. 274(1- |
| (for example but | 2):245-56, 2003 |
| not exclusively Tat) | |
| Lipid mediated | Nagahara et al., Nat. Med. 4(12):1449-52, 1998 |
| (e.g., DOPE, PEG) | Zeng et al., J. Virol. 81(5):2401-17, 2007 |
| | Caplen et al., Gene Ther. 2(9):603-13, |
| | 1995Manconi et al., Int. J. Pharm. 234(1- |
| | 2):237-48, 2006 |
| | Amrite et al., Invest. Ophthalmol. Vis. Sci. |
| | 47(3):1149-60, 2006 |
| | Chalberg et al., Invest. Ophthalmol. Vis. Sci. |
| | 46(6):2140-6, 2005 |

TABLE 6
Exemplary neurotrophic factors, anti-apoptotic agents and antioxidants.
Neurotrophic factor genes, anti-apoptotic agents or antioxidants
which may be used in conjunction with the optimised NdiI therapy
contemplated in this patent application. These genes may be delivered
at the same time as the NdiI therapy or at a different time, using the
same vector as the NdiI therapy or a different one. Neurotrophic factor,
anti-apoptotic agents or antioxidants genes may be expressed from
ubiquitously expressed promoters such as CMV and Ubiquitin (Table 4)
or from one of the promoters described in Tables 2 and 3.

| Neurotrophic factor | Reference |
|---|---|
| NGF | Carmignoto et al., 1989 |
| b-NGF | Lipps 2002 |
| NT-3 | Lu et al., 2011 |
| NT4 | Krishnamoorthy et al., 2001 |
| BDNF | Krishnamoorthy et al., 2001; DiPolo et al., |
| | 1998; Garcia and Sharma 1998; Carmignoto |
| | et al., 1989 |
| GDNF | Wu et al., 2004, Frasson et al., 1999, |
| | Gregory-Evans et al., 2009 |
| NTN (Neurturin) | Koeberle et al 2002 |
| aFGF and bFGF | Faktorovich et al. 1900; LaVail et al., |
| | 1991, 1992 Perry et al., 1995; McLaren and |
| | Inana 1997; Akimoto et al., 1999; Uteza et |
| | al., 1999; Lau et al., 2000 |
| LIF | Joly et al., 2008, Rhee and Yang, 2010 |
| CNTF | Sieving et al., 2006, Thanos et al., 2009, Li et |
| | al., 2011 |
| Hepatocyte growth factor | Tönges et al., 2011 |
| PDGF | Akiyaman et al., 2006 |
| VEGF | Trujillo et al., 2007 |
| PEDF | Cayouette et al., 1999 |
| RdCVF | Leveillard et al., 2004 |
| Chondroitinase ABC | Liu 2011 |
| Erythropoietin | Rex et al., 2009, Rong et al., 2011, Gong et al |
| | 2011, Hu et al., 2011, Sullivan et al., 2011 |
| Suberythropoietc Epo | Wang et al., 2011 |
| Anti-apoptotic agents | Reference |
| Calpain inhibitor I | McKenan et al., 2007 |
| Calpain inhibitor II | McKenan et al., 2007 |
| Calpeptin | McKenan et al., 2007 |
| PARP | |
| Norgestrel | Doonan et al., 2011 |
| Antioxidant | Reference |
| Vitamin C | www.nei.nih.gov/amd |
| Vitamin E | www.nei.nih.gov/amd |
| Beta-carotene | www.nei.nih.gov/amd |
| SOD2 +/− catalase | Jung et al., 2007, Usui et al., 2009, Doonan |
| | al., 2009 |
| Rosiglitazone | Doonan et al., 2009 |
| Sestrin-1 | Budanov et al., 2002, 2004 |
| PPAR | Aoun et al., 2003, Zhao et al., 2006 |
| | Tomita et al., 2005, Komeina et al., 2006, 2007 |
| Lutein | Li et al., 2010 |

TABLE 7
Disease phenotypes and genotypes associated with mitochondrial disease.
Clinical Phenotypes (non-LHON) Associated with mtDNA Polypeptide Gene Mutations
(http://www.mitomap.org/bin/view.pl/MITOMAP/ClinicalPhenotypesPolypeptide)

| | | | | Nucleotide | |
|---|---|---|---|---|---|
| Syndromes | Locus | Disease* | Allele | Change | AA Change |
| Dystonia | MTND | Adult-Onset Dystonia | A3796G | A-G | T164A |
| | 1 | | | | |
| Dystonia, Leigh | MTND | LS/Dystonia | T14487C | T-C | M63V |
| Syndrome | 6 | | | | |
| Dystonia, Leigh | MTND | LDYT/LS | G14459A | G-A | A72V |
| Syndrome | 6 | | | | |
| Leigh Syndrome | MTND | LS | T10158C | T-C | S34P |
| | 3 | | | | |
| Leigh Syndrome | MTND | LS-like/ESOC | T10191C | T-C | S45P |
| | 3 | | | | |
| Leigh Syndrome | MTND | LS | C11777A | C-A | R340S |
| | 4 | | | | |
| Leigh Syndrome | MTND | LS | T12706C | T-C | F124L |
| | 5 | | | | |
| Leigh syndrome | MTATP | LS/FBSN | T9176C | T-C | L217P |
| | 6 | | | | |
| Leigh Syndrome | MTATP | LS | T9176G | T-G | L217R |
| | 6 | | | | |
| Leigh Syndrome | MTATP | LS | T9185C | T-C | L220P |
| | 6 | | | | |
| Leigh Syndrome | MTATP | LS | T9191C | T C | L222P |
| | 6 | | | | |
| Leigh Syndrome | MTATP | LS/NARP | T8993C | T-C | L156P |
| | 6 | | | | |
| Neurogenic | MTATP | NARP | T8993G | T-G | L156R |
| Muscle Weakness | 6 | | | | |
| Ataxia and | | | | | |
| Retinitis | | | | | |
| Pigmentosa | | | | | |
| Leigh Syndrome | MTCO3 | LS-like | C9537ins | C-CC | Q111frameshift |
| | | | C | | |
| Encephalomyopathy, | MTND | MELAS | T3308C | T C | M1T |
| MELAS | 1 | | | | |
| Encephalomyopathy, | MTND | MELAS/LHON | G3376A | G-A | E24K |
| MELAS | 1 | | | | |
| Encephalomyopathy, | MTND | MELAS | G3697A | G-A | G131S |
| MELAS | 1 | | | | |
| Encephalomyopathy, | MTND | MELAS | G3946A | G-A | E214K |
| MELAS | 1 | | | | |
| Encephalomyopathy, | MTND | MELAS | T3949C | T-C | Y215H |
| MELAS | 1 | | | | |
| Encephalomyopathy, | MTND | MELAS | A11084G | A-G | T109A |
| MELAS | 4 | | | | |
| Encephalomyopathy, | MTND | MELAS | A12770G | A-G | E145G |
| MELAS | 5 | | | | |
| Encephalomyopathy, | MTND | MELAS/LHON/LS | A13045C | A-C | M237L |
| MELAS | 5 | overlap syndrome | | | |
| Encephalomyopathy, | MTND | MELAS/LS | A13084T | A-T | S250C |
| MELAS | 5 | | | | |
| Encephalomyopathy, | MTND | MELAS/LS | G13513A | G-A | D393N |
| MELAS | 5 | | | | |
| Encephalomyopathy, | MTND | MELAS | A13514G | A-G | D393G |
| MELAS | 5 | | | | |
| Encephalomyopathy, | MTND | MELAS | G14453A | G-A | A74V |
| MELAS | 6 | | | | |
| Encephalomyopathy, | MTCY | MELAS/PD | 14787del | TTAA- | I14frameshift |
| MELAS | B | | 4 | del | |
| Epilepsy | MTCO1 | Therapy-resistant | C6489A | C-A | L196I |
| | | Epilepsy | | | |
| Encephalomyopathy, | MTCO1 | Multisystem Disorder | G6930A | G-A | G343Ter |
| Multisystem | | | | | |
| Disorder | | | | | |
| Encephalomyopathy, | MTCOI | Myopathy and Cortical | 6015del5 | Del 5 bp | Frameshift, 42 |
| Multisystem | | Lesions | | | peptide |
| Disorder | | | | | |
| Encephalomyopathy | MTCO2 | Encephalomyopathy | T7587C | T-C | M1T |
| Encephalomyopathy, | MTCO2 | Multisystem Disorder | G7896A | G-A | W104Ter |
| Multisystem | | | | | |
| Disorder | | | | | |
| Encephalomyopathy, | MTCO2 | Lactic Acidosis | 8042del2 | AT-del | M153Ter |
| Lactic | | | | | |
| Acidosis | | | | | |
| Encephalomyopathy | MTCO3 | Encephalomyopathy | G9952A | G-A | W248Ter |
| Encephalomyopathy, | MTCO3 | MELAS/PEM/NAION | T9957C | T-C | F251L |
| MELAS | | | | | |
| Encephalomyopathy, | MTATP | Lactic Acidosis/ | 9205del2 | TA-del | Ter227M |
| Lactic | 6 | Seizures | | | |
| Acidosis | | | | | |
| Encephalomyopathy, | MTCY | Multisystem Disorder | A15579G | A-G | Y278C |
| Lactic | B | | | | |
| Acidosis | | | | | |
| Encephalomyopathy, | MTCY | Septo-Optic Dysplasia | T14849C | T-C | S35P |
| Septo-Optic | B | | | | |
| Dysplasia | | | | | |
| MM, Exercise | MTCY | EXIT | G14846A | G-A | G34S |
| Intolerance | B | | | | |
| Mitochondrial | MTCY | MM | G15059A | G-A | G190Ter |
| Myopathy | B | | | | |
| MM, Exercise | MTCY | EXIT | G15084A | G-A | W113Ter |
| Intolerance | B | | | | |
| MM, Exercise | MTCY | EXIT | G15150A | G-A | W135Ter |
| Intolerance | B | | | | |
| MM, Exercise | MTCY | EXIT | G15168A | G-A | W141Ter |
| Intolerance | B | | | | |
| MM, Exercise | MTCY | EXIT | T15197C | T-C | S151P |
| Intolerance | B | | | | |
| MM, Exercise | MTCY | EXIT/ | G15242A | G-A | G166Ter |
| Intolerance | B | Encephalomyopathy | | | |
| MM, Exercise | MTCY | EXIT | G15497A | G-A | G251S |
| Intolerance | B | | | | |
| MM, Exercise | MTCY | EXIT | 15498del24 | 24 bp | 251GDPDNYT |
| Intolerance | B | | | deletion- | L-del258 |
| MM, Exercise | MTCY | EXIT | G15615A | G-A | G290D |
| Intolerance | B | | | | |
| MM, Exercise | MTCY | EXIT | G15723A | G-A | W326Ter |
| Intolerance | B | | | | |
| Mitochondrial | MTCY | MM | G15762A | G-A | G339E |
| Myopathy | B | | | | |
| MM, CPEO | MTND | CPEO | T11232C | T-C | L140P |
| | 4 | | | | |
| MM, Exercise | MTND | EXIT | G11832A | G-A | W358Ter |
| Intolerance | 4 | | | | |
| MM, Exercise | MTCO1 | EXIT/Myoglobinuria | G5920A | G-A | W6Ter |
| Intolerance | | | | | |
| Mitochondrial | MTCO1 | MM & | G6708A | G-A | G269Ter |
| Myopathy | | Rhabdomyolysis | | | |
| Mitochondrial | MTCO2 | MM | T7671A | T-A | M29K |
| Myopathy | | | | | |
| MM, Exercise | MTCO2 | EXIT/Rhabdomyolysis | T7989C | T-C | L135P |
| Intolerance | | | | | |
| Mitochondrial | MTCO3 | Myopathy and | 9487del15 | Del 15 bp | Removed 5 aa |
| Myopathy | | Myoglobinuria | | | |
| Hypertrophic | MTCY | HCM | G15243A | G-A | G166E |
| Cardiomyopathy | B | | | | |
| Hypertrophic | MTCY | HCM | G15498A | G-A | G251D |
| Cardiomyopathy | B | | | | |
| Deafness | MTCO1 | DEAF | A7443G | A-G | Ter514G |
| Deafness | MTCO1 | DEAF | 1A7445C | A-C | Ter514S |
| Deafness-Sensory | MTCO1 | SNHL/LHON | G7444A | G-A | Ter514K |
| Neural Hearing | | | | | |
| Loss | | | | | |
| Deafness-Sensory | MTCO1 | SNHL | A7445G | A-G | Ter514Ter |
| Neural Hearing | | | | | |
| Loss | | | | | |
| Deafness-Sensory | MTCO2 | SNHL | A8108G | A-G | I175V |
| Neural Hearing | | | | | |
| Loss | | | | | |
| Deafness-Sensory | MTND | SNHL | C14340T | C-T | V112M |
| Neural Hearing | 6 | | | | |
| Loss | | | | | |
| Diabetes Mellitus | MTND | NIDDM/PEO | G3316A | G-A | A4T |
| | 1 | | | | |
| Diabetes Mellitus | MTND | DM | A12026G | A-G | I423V |
| | 4 | | | | |
| Alzheimer & | MTND | ADPD | A3397G | A-G | M31V |
| Parkinson Disease | 1 | | | | |
| Alzheimer & | MTND | AD | G5460A | G-A | A331T |
| Parkinson Disease | 2 | | | | |
| Alzheimer & | MTND | AD | G5460T | G-T | A331S |
| Parkinson Disease | 2 | | | | |
| Idiopathic | MTCO1 | SIDA | T6721C | T-C | M273T |
| Sideroblastic | | | | | |
| Anemia | | | | | |
| Idiopathic | MTCO1 | SIDA | T6742C | T-C | I280T |
| Sideroblastic | | | | | |
| Anemia | | | | | |

Abbreviations
♦Plasmy: Ho, homoplasmy; He, heteroplasmy
*Disease: AD, Alzheimer's Disease; ADPD, Alzheimer's Disease and Parkinsons's Disease; CPEO, Chronic Progressive External
Ophthalmoplegia; EXIT, exercise intolerance; LHON Leber Hereditary Optic Neuropathy; LS, Leigh Syndrome; MELAS,
Mitochondrial Encephalomyopathy, Lactic Acidosis, and Stroke-like episodes; MM, mitochondrial myopathy; NAION Nonarteritic
Anterior Ischemic Optic Neuropathy; NARP, Neurogenic muscle weakness, Ataxia, and Retinitis Pigmentosa; NIDDM, Non-Insulin
Dependent Diabetes Mellitus; SIDA, sideroblastic anemia; SNHL, Sensorineural Hearing Loss.
** Status: Cfrm, considered confirmed by multiple reports in the literature; Prov, provisional isolated report(s), not yet confirmed by
multiple labs; P.M., reported originally in the literature at pathogenic but now generally considered to be a polymorphic variant.
Clinical Phenotypes (non-LHON) Associated with mtDNA rRNA & tRNA Mutations (http://www.mitomap.org/bin/view.pl/
MITOMAP/ClinicalPhenotypesRNA)

| Syndromes | Locus | Disease* | Allele | RNA |
|---|---|---|---|---|
| Encephalomyopathy, | MTTV | LS | C1624T | tRNA Val |
| Leigh Syndrome | | | | |
| Encephalomyopathy, | MTTV | Adult LS | G1644T | tRNA Val |
| Leigh Syndrome | | | | |
| Encephalomyopathy | MTTW | MILS | A5537insT | tRNA Trp |
| Leigh Syndrome | | | | |
| Encephalomyopathy | MTTK | MERRF | A8344G | ItRNA Lys |
| MERRF | | | | |
| Encephalomyopathy | MTTK | MERRF | T8356C | tRNA Lys |
| MERRF | | | | |
| Encephalomyopathy | MTTK | MERRF | G8361A | tRNA Lys |
| MERRF | | | | |
| Encephalomyopathy | MTTK | MERRF/MICM+ | G8363A | tRNA Lys |
| MERRF | | DEAF/Autism | | |
| Encephalomyopathy | MTTL1 | MERRF/KSS overlap | G3255A | tRNA Leu |
| MERRF | | | | ( UUR) |
| Encephalomyopathy | MTTF | MERRF | G611A | tRNA Phe |
| MERRF | | | | |
| Encephalomyopathy | MTTD | MEPR | A7543G | tRNA |
| Myoclonus and | | | | Asp |
| Psychomotor | | | | |
| Regression | | | | |
| Encephalomyopathy | MTTV | AMDF | G1606A | tRNA Val |
| Ataxia, Myoclonus | | | | |
| and Deafness | | | | |
| Encephalomyopathy | MTTH | MERRF-MELAS/ | G12147A | tRNA His |
| MERRF | | Cerebral edema | | |
| Encephalomyopathy | MTTL1 | MELAS | A3243G | tRNA Leu |
| MELAS | | | | (UUR) |
| Encephalomyopathy | MTTL1 | MELAS | G3244A | tRNA Leu |
| MELAS | | | | (UUR) |
| Encephalomyopathy | MTTL1 | MELAS | A3252G | tRNA Leu |
| MELAS | | | | (UUR) |
| Encephalomyopathy | MTTL1 | MELAS | C3256T | tRNA Leu |
| MELAS | | | | (UUR) |
| Encephalomyopathy | MTTL1 | MELAS/Myopathy | T3258C | tRNA Leu |
| MELAS | | | | (UUR) |
| Encephalomyopathy | MTTL1 | MELAS | T3271C | tRNA Leu |
| MELAS | | | | (UUR) |
| Encephalomyopathy | MTTL1 | MELAS | T3291C | tRNA Leu |
| MELAS | | | | (UUR) |
| Encephalomyopathy | MTTV | MELAS | G1642A | tRNA Val |
| MELAS | | | | |
| Encephalomyopathy | MTTQ | MELAS/ | G4332A | tRNA Gln |
| MELAS | | Encephalopathy | | |
| Encephalomyopathy | MTTF | MELAS | G583A | tRNA Phe |
| MELAS | | | | |
| Encephalomyopathy | MTRNR | MELAS | C3093G | 16S |
| MELAS | 2 | | | rRNA |
| Encephalomyopathy | MTTL1 | PEM | T3271delT | tRNA Leu |
| | | | | (UUR) |
| Encephalomyopathy | MTTI | Progressive | T4290C | tRNA Ile |
| | | Encephalopathy | | |
| Encephalomyopathy | MTTI | (Mitochondria | C4320T | tRNA Ile |
| | | Encephalo- | | |
| | | cardiomyopathy | | |
| Encephalomyopathy | MTTW | Encephalomyopathy | G5540A | tRNA Trp |
| Encephalomyopathy | MTTC | Encephalopathy | T5814C | tRNA Cys |
| Encephalomyopathy | MTTS1 | PEM/AMDF | C7472insC | tRNA Ser |
| | | | | (UCN) |
| Encephalomyopathy | MTTS1 | PEM/MERME | T7512C | tRNA Ser |
| | | | | (UCN) |
| Encephalomyopathy | MTTK | Encephalopathy | C8302T | tRNA Lys |
| Encephalomyopathy | MTTK | Mitochondrial | G8328A | tRNA Lys |
| | | Encephalopathy | | |
| Encephalomyopathy | MTTG | PEM | T10010C | tRNA Gly |
| Encephalomyopathy | MTATT | Encephalomyopathy | G15915A | tRNA Thr |
| Encepehaolmyopathy | MTRNR | Rett Syndrome | C2835T | rRNA |
| Rett Syndrome | 2 | | | 16S |
| Multisystem Disease | MTTI | Varied familial | G4284A | tRNA Ile |
| | | presentation | | |
| Encephalomyopathy | MTTG | GER/SIDS | A10044G | tRNA Gly |
| Gastrointestinal | | | | |
| Reflux and Sudden | | | | |
| Infant Death | | | | |
| Syndrome | | | | |
| Mitochondrial | MTTF | MM | T582C | tRNA Phe |
| Myopathy | | | | |
| Mitochondrial | MTTF | MM | T618C | tRNA Phe |
| Myopathy | | | | |
| Mitochondrial | MTTL1 | MM | G3242A | tRNA Leu |
| Myopathy | | | | (UUR) |
| Mitochondrial | MTTL1 | MM/CPEO | A3243G | TRNA |
| Myopathy | | | | Leu(UUR) |
| Mitochondrial | MTTL1 | MM | A3243T | tRNA |
| Myopathy | | | | Leu(UUR) |
| Mitochondrial | MTTL1 | MM/CPEO | T3250C | tRNA Leu |
| Myopathy | | | | (UUR) |
| Mitochondrial | MTTL1 | MM | A3251G | tRNA Leu |
| Myopathy | | | | (UUR) |
| Mitochondrial | MTTL1 | MM | C3254G | tRNA Leu |
| Myopathy | | | | (UUR) |
| Mitochondrial | MTTL1 | Myopathy | A3280G | tRNA Leu |
| Myopathy | | | | (UUR) |
| Mitochondrial | MTTL1 | Myopathy | A3288G | TRNA |
| Myopathy | | | | Leu(UUR) |
| Mitochondrial | MTTL1 | MM | A3302G | tRNA Leu |
| Myopathy | | | | (UUR) |
| Mitochondrial | MTTI | MM | A4267G | tRNA Ile |
| Myopathy | | | | |
| Mitochondrial | MTTQ | Myopathy | T4370AT | tRNA Gln |
| Myopathy | | | | |
| Mitochondrial | MTTM | MM | T4409C | tRNA |
| Myopathy | | | | Met |
| Mitochondrial | MTTM | MM | G4450A | tRNA |
| Myopathy | | | | Met |
| Mitochondrial | MTTW | MM | G5521A | tRNA Trp |
| Myopathy | | | | |
| Mitochondrial | MTTS1 | MM | T7480G | tRNA Ser |
| Myopathy | | | | (UCN) |
| Mitochondrial | MTTS1 | MM | G7497A | tRNA Ser |
| Myopathy | | | | (UCN) |
| Mitochondrial | MTTK | Myopathy | T8355C | tRNA Lys |
| Myopathy | | | | |
| Mitochondrial | MTTK | Myopathy | T8362G | tRNA Lys |
| Myopathy | | | | |
| Mitochondrial | MTTG | Myopathy | G10014A | tRNA Gly |
| Myopathy | | | | |
| Mitochondrial | MTTL2 | MM | A12320G | tRNA Leu |
| Myopathy | | | | (CUN) |
| Mitochondrial | MTTE | MM + DM | T14709C | tRNA Glu |
| Myopathy | | | | |
| Mitochondrial | MTTT | MM | T15940delT | tRNA Thr |
| Myopathy | | | | |
| Mitochondrial | MTTP | MM | C15990T | tRNA Pro |
| Myopathy | | | | |
| Mitochondrial | MTTY | Exercise Intolerance | T5874G | tRNA Tyr |
| Myopathy, Exercise | | | | |
| Intolerance | | | | |
| Mitochondrial | MTTL1 | CPEO | C3254T | tRNA Leu |
| Myopathy, CPEO | | | | (UUR) |
| Mitochondrial | MTTI | CPEO | T4274C | tRNA Ile |
| Myopathy, CPEO | | | | |
| Mitochondrial | MTTI | CPEO | T4285C | tRNA Ile |
| Myopathy, CPEO | | | | |
| Mitochondrial | MTTI | CPEO/MS | G4298A | tRNA Ile |
| Myopathy, CPEO | | | | |
| Mitochondrial | MTTI | CPEO | G4309A | tRNA Ile |
| Myopathy, CPEO | | | | |
| Mitochondrial | MTTA | CPEO | T5628C | tRNA Ala |
| Myopathy, CPEO | | | | Asn |
| Mitochondrial | MTTN | CPEO/MM | T5692C | tRNA |
| Myopathy, CPEO | | | | Asn |
| Mitochondrial | MTTN | CPEO/MM | G5698A | tRNA |
| Myopathy, CPEO | | | | Asn |
| Mitochondrial | MTTN | CPEO/MM | G5703G | tRNA |
| Myopathy, CPEO | | | | Asn |
| Mitochondrial | MTTK | CPEO + Myoclonus | G8342A | tRNA Lys |
| Myopathy, CPEO | | | | |
| Mitochondrial | MTTL2 | CPEO | G12294A | tRNA Leu |
| Myopathy, CPEO | | | | (CUN) |
| Mitochondrial | MTTL2 | CPEO/Stroke/CM | A12308G | tRNA Leu |
| Myopathy, CPEO | | | | (CUN) |
| Mitochondrial | MTTL2 | CPEO | T12311C | tRNA Leu |
| Myopathy, CPEO | | | | (CUN) |
| Mitochondrial | MTTL2 | CPEO | G12315A | tRNA Leu |
| Myopathy, CPEO | | | | (CUN) |
| Mitochondrial | MTTL1 | Ocular myopathy | T3273C | tRNA Leu |
| Myopathy, Ocular | | | | (UUR) |
| Myopathy | | | | |
| Mitochondrial | MTTL1 | KSS | G3249A | tRNA Leu |
| Myopathy, KSS | | | | (UUR) |
| Mitochondrial | MTTY | Mitochondrial | A5843G | tRNA Tyr |
| Myopathy | | Cytopathy/ | | |
| Cytopathy | | FSGS | | |
| Mitochondrial | MTTK | Mitochondrial | A8326G | tRNA Lys |
| Myopathy | | cytopathy | | |
| Cytopathy | | | | |
| Mitochondrial | MTTP | Mitochondrial | G15995A | tRNA Pro |
| Myopathy | | cytopathy | | |
| Cytopathy | | | | |
| Mitochondrial | MTTF | Myoglobinuria | A606G | TRNA |
| Myopathy with | | | | Phe |
| Myoglobinuria | | | | |
| Mitochondrial | MTTW | Gastrointestinal | G5532A | tRNA Trp |
| Myopathy, | | Syndrome | | |
| Gastrointestinal | | | | |
| Syndrome | | | | |
| Mitochondrial | MTTK | MNGIE | G8313A | tRNA Lys |
| Myopathy, | | | | |
| Mitochondrial | | | | |
| Neurogastrointestinal | | | | |
| Encephalomyopathy | | | | |
| Mitochondrial | MTTG | CIPO | A10006G | tRNA Gly |
| Myopathy with | | | | |
| Chronic Intestinal | | | | |
| Pseudoobstruction | | | | |
| Mitochondrial | MTTS1 | CIPO | C12246G | tRNA Ser |
| Myopathy with | | | | (AGY) |
| Chronic Intestinal | | | | |
| Pseudoobstruction | | | | |
| Mitochondrial | MTTF | Tubulointerstitial | A608G | tRNA Phe |
| Myopathy with | | nephritis | | |
| Renal Dysfunction | | | | |
| Mitochondrial | MTTT | LIMM | A15923G | tRNA Thr |
| Myopathy Lethal | | | | |
| Infantile | | | | |
| Mitochondrial | | | | |
| Myopathy | | | | |
| Mitochondrial | MTTT | LIMM | A15924G | tRNA Thr |
| Myopathy Lethal | | | | |
| Infantile | | | | |
| Mitochondrial | | | | |
| Myopathy | | | | |
| Mitochondrial | MTTL1 | MMC | A3260G | tRNA Leu |
| Myopathy and | | | | (UUR) |
| cardiomyopathy | | | | |
| Mitochondrial | MTTL1 | MMC | C3303T | tRNA Leu |
| Myopathy and | | | | (UUR) |
| cardiomyopathy | | | | |
| Maternaly Inherited | MTTI | MHCM | A4295G | tRNA Ile |
| Hypertrophic | | | | |
| Cardiomyopathy | | | | |
| Maternally Inherited | MTTI | MICM | A4300G | tRNA Ile |
| Cardiomyopathy | | | | |
| Cardiomyopathy | MTTK | Cardiomyopathy | A8348G | tRNA Lys |
| Maternally Inherited | MTTG | MHCM | T9997C | tRNA Gly |
| Hypertrophic | | | | |
| Cardiomyopathy | | | | |
| Maternally Inherited | MTTH | MICM | G12192A | tRNA His |
| Cardiomyopathy | | | | |
| Cardiomyopathy | MTTL2 | Dilated | T12297C | tRNA Leu |
| | | Cardiomyopathy | | (CUN) |
| Fatal Infantile | MTTI | FICP | A4269G | tRNA Ile |
| Cardiomyopathy | | | | |
| Plus (MELAS) | | | | |
| Fatal Infantile | MTTI | FICP | A4317G | tRNA Ile |
| Cardiomyopathy | | | | |
| Plus (MELAS) | | | | |
| Deafness | MTRNR | DEAF | A827G | 12S |
| | 1 | | | rRNA |
| Deafness | MTRNR | DEAF | T961C | 12S |
| | 1 | | | rRNA |
| Deafness | MTRNR | DEAF | T961delT+C(n)ins | 12S |
| | 1 | | | rRNA |
| Deafness | MTRNR | DEAF | T961insC | 12S |
| | 1 | | | rRNA |
| Deafness | MTRNR | DEAF | T1005C | 12S |
| | 1 | | | rRNA |
| Deafness | MTRNR | SNHL | T1095C | 12S |
| Sensory Neural | 1 | | | rRNA |
| Hearing Loss | | | | |
| Deafness | MTRNR | DEAF | A1116G | 12S |
| | 1 | | | rRNA |
| Deafness | MTRNR | DEAF | C1494T | 12S |
| | 1 | | | rRNA |
| Deafness | MTRNR | DEAF | A1555G | 12S |
| | 1 | | | rRNA |
| Deafness | MTTS1 | SNHL | T7510C | tRNA Ser |
| Sensory Neural | | | | (UCN) |
| Hearing Loss | | | | |
| Deafness | MTTS1 | SNHL | T7511C | tRNA |
| Sensory Neural | | | | Ser(UCN) |
| Hearing Loss | | | | |
| Deafness | MTTS1 | Deafness and Cerebellar | 7472insC | tRNA |
| cerebellar | | Dysfunction | | Ser(UCN) |
| dysfunction | | | | |
| Deafness | MTTH | DEAF + RP | G12183A | tRNA His |
| Deafness Ataxia and | MTTE | Deafness, Mental | 14709G | tRNA Glu |
| MR | | Retaration, | | |
| | | Cerebellar Dysfunction | | |
| Diabetes Mellitus | MTRNR | DM | C1310T | 12S |
| | 1 | | | |
| Diabetes Mellitus | MTRNR | DM | A1438G | 12S |
| | 1 | | | |
| Diabetes Mellitus & | MTTL1 | DM/DMDF | A3243G | tRNA Leu |
| Deafness | | | | (UUR) |
| Diabetes Mellitus | MTTL1 | DM | T3264C | tRNALeu |
| | | | | (UUR) |
| Diabetes Mellitus | MTTL1 | DM | T3271C | tRNA Leu |
| | | | | (UUR) |
| Diabetes Mellitus | MTTI | Metabolic Syndrome & | T4291C | tRNA Ile |
| Metabolic | | Hypomagnesemia | | |
| Syndrome | | | | |
| Diabetes Mellitus & | MTTK | DMDF/MERRF/HCM | A8296G | tRNA Lys |
| Deafness & | | | | |
| Cardiomyopathy | | | | |
| Diabetes Mellitus & | MTTS2 | DMDF | C12258A | tRNA Ser |
| Deafness and | | | | (AGY) |
| Retinitis Pigmentosa | | | | |
| Movement Disorder | MTTV | Movement Disorder | T1659C | tRNA Val |
| Alzheimer & | MTRNR | ADPD | G3196A | rRNA |
| Parkinson Disease | 2 | | | 16S |
| Alzheimer & | MTTQ | ADPD/Hearing loss and | T4336C | tRNA Gln |
| Parkinson Disease | | migraine | | |
| Deafness & | | | | |
| Migraine | | | | |
| Dementia and | MTTW | DEMCHO | G5549A | tRNA Trp |
| Chorea | | | | |

Abbreviations
Plasmy: Ho, homoplasmy; He, heteroplasmy
*Disease: AD, Alzheimer's Disease; ADPD, Alzheimer's Disease and Parkinsons's Disease; CIPO Chronic Intestinal
Pseudoobstruction with myopathy and Ophthalmoplegia; CPEO, Chronic Progressive External Ophthalmoplegia; DEMCHO,
Dementia and Chorea; DM, Diabetes Mellitus; DMDF Diabetes Mellitus & Deafness; EXIT, exercise intolerance; FBSN Familial
Bilateral Striatal Necrosis; FICP Fatal Infantile Cardiomyopathy Plus, a MELAS-associated cardiomyopathy; HCM, Hypertrophic
CardioMyopathy; LS, Leigh Syndrome; MELAS, Mitochondrial Encephalomyopathy, Lactic Acidosis, and Stroke-like episodes;
MERRF Myoclonic Epilepsy and Ragged Red Muscle Fibers; MHCM Maternally Inherited Hypertrophic Cardiomyopathy; MICM
Maternally Inherited Cardiomyopathy; MM, mitochondrial myopathy; NAION Nonarteritic Anterior Ischemic Optic Neuropathy;
NARP, Neurogenic muscle weakness, Ataxia, and Retinitis Pigmentosa; NIDDM, Non-Insulin Dependent Diabetes Mellitus; SNHL,
Sensorineural Hearing Loss.
**Status: Cfrm, considered confirmed by multiple reports in the literature; Prov, provisional isolated report(s), not yet confirmed by
multiple labs; P.M., reported originally in the literature at pathogenic but now generally considered to be a polymorphic variant.

TABLE 8
Disease phenotypes which are associated with
mitochondrial mutations and where similar phenotypes may be caused
by genomic mutations. Patients with these phenotypes,
whether due to mitochondrial or genomic mutations,
may benefit from OphNDI1 treatment. Possible target tissues
for therapies directed to these disorders are indicated.

| Disease phenotype | Possible target tissue type |
|---|---|
| Encephalomyopathy | Brain, Muscle |
| Cardiomyopathy | Muscle |
| Myopathy | Muscle |
| Migraine | Brain |
| Gastrointestinal Reflux and | Brain |
| Sudden Infant Death Syndrome | |
| Lactic Acidosis | Muscle |
| Muscle Weakness | Muscle |
| Deafness | Neurons |
| Alzheimer | Brain |
| Dementia | Brain |
| Epilepsy | Brain |
| Septo-Optic Dysplasia | Brain, Optic Nerve, Pituitary |
| Parkinson Disease | Brain |
| Anemia | Bone marrow |
| Dystonia | Brain |
| Ataxia | Brain |
| Sensory Neural Hearing Loss | Neurons in ear |
| Chorea | Brain |
| Retinitis Pigmentosa | Photoreceptor cell in retina |
| Exercise Intolerance | Muscles |
| Diabetes | Pancreas |
| Age related macular degeneration | Photoreceptor cell in retina |

The application's sequence listing, which the Patent Office published only in electronic form, follows.

SEQUENCE LISTING (1005 sequences)

SEQ ID NO: 1 - DNA, 1542 bp, Saccharomyces cerevisiae
atgctatcgaagaatttgtatagtaacaagaggttgctcacctcgacgaatacgctagtcagattcgcttccaccagatccacaggggtggaaaactccggagcaggtcctacatcttttaagaccatgaaagtcattgaccctcagcacagcgacaaaccaaacgtgctgatactgggttcggggtggggagctatttcgtttttaaagcacattgacaccaagaagtacaacgtttccatcatctctcctagaagctatttcttatttacgcctttgttaccttctgcaccagttgggacagtagacgaaaagtcaattattgagcccatcgttaattttgctctcaagaaaaaggggaacgttacctactatgaggcagaagccacctctatcaatcccgacaggaataccgttaccataaaatcattatctgccgttagccagctataccaacctgaaaaccatctagggctgcatcaagcagaacctgctgaaattaagtacgattatttaatcagtgctgtaggtgcggaacctaacacatttggtattcctggggtcactgattacggtcatttcctgaaggaaattcccaactctttggaaataagaagaacttttgccgccaatctagagaaggctaacttattgccaaagggtgatcccgaaagaagaagactactgtccattgtcgtggttggtggtgggcctactggtgtagaggccgctggtgaactacaggattatgttcaccaggacctgagaaagtttctccctgcattggccgaagaagtccaaattcacttggtcgaagctctgcccatcgttttgaatatgtttgagaaaaagctttcatcatacgcgcaatcacatttagaaaacacttcgatcaaagtacatctgagaacggctgtcgccaaagttgaagaaaagcaattgttggcaaagaccaaacacgaagacggtaaaataaccgaagaaactattccatacggtactttgatttgggccacgggtaacaaggcaagaccggtaatcactgaccttttcaagaaaattcctgagcaaaactcgtccaagagaggattggcagtgaatgactttttgcaggtgaaaggcagcaacaacattttcgccattggtgacaatgcatttgctgggttgccaccaaccgcccaagtagcgcaccaagaggccgaatatttggccaagaattttgataaaatggctcaaataccaaatttccaaaagaatctatcttcaagaaaggataaaattgatctcttgttcgaggagaacaactttaaacctttcaaatacaacgatttaggtgccttagcatacctgggatccgaaagggccattgcaaccatacgttccggtaagagaacattttacaccggtggtggcttaatgaccttctacttatggagaattttgtacttgtccatgattctatctgcaagatcgagattaaaggtctttttcgactggattaaattagcatttttcaaaagagacttttttaaaggattatag

SEQ ID NO: 2 - DNA, 1542 bp, Artificial Sequence
  source: /note="Description of Artificial Sequence: Synthetic polynucleotide"
atgctgtcgaagaatctgtacagcaacaagcggttgctcacctcgacgaacaccctagtccgcttcgcctccaccagatccacaggggtggaaaactccggggcaggtcctacatcttttaagaccatgaaggtcattgacccccagcacagcgacaagccaaacgtgctgatactgggctcggggtggggagccatttcgtttctgaagcacattgacaccaagaagtacaacgtttccatcatctctcccagaagctatttcttattcacccctttgctgccctctgccccagttgggaccgtagacgaaaagtcaattattgagcccatcgttaactttgctctgaagaaaaaggggaacgtcacctactatgaggcagaagccaccagcatcaaccccgaccggaataccgtgaccataaaatcactgtctgccgtgagccagctataccagcctgaaaaccatctagggctgcatcaagccgaacccgctgagattaagtacgattatttaatcagtgctgtgggtgcggaacctaacacatttggtatccctggggtcactgactacggccatttcctgaaggagatccccaactctttggaaatccggagaacttttgccgccaatctagagaaggctaacttactgccaaagggtgatcccgagagaagaagactactgagcatcgtcgtggttggcggtggccctactggtgtagaggctgctggtgagctacaggattacgttcaccaggacctgagaaagtttctgcctgcattggccgaagaagtgcagattcacttggtcgaagccctgcccatcgtgttgaatatgttcgagaagaagctttcatcatacgcgcaatcacatttagaaaacacttcgatcaaagtacatctgagaacggctgtggccaaagttgaagaaaagcagttgttggcaaagaccaaacacgaagacggtaaaataaccgaggaaaccatcccatacggtaccttgatttgggccacgggcaacaaggcaagacccgtaatcaccgaccttttcaagaaaattcctgagcaaaactcgtccaagagaggattggccgtgaatgacttcttgcaggtgaaaggcagcaacaacattttcgccatcggtgacaacgcatttgctgggctgcctccaacagcccaagtggcgcaccaggaggccgagtatttggccaagaattttgataagatggcccaaataccaaatttccaaaagaacctatcttcaagaaaggataaaatcgatctcctgttcgaggagaacaactttaaacccttcaaatacaacgacttaggcgccttagcatacctgggaagcgaaagagccattgcaaccatacgttccggtaagagaaccttctacaccggtggtggcctgatgaccttctacttatggagaatcttgtacttgtccatgatcctatctgcaagatcgagattaaaggtgtttttcgactggattaagttagcatttttcaagagggactttttcaaaggattatga

SEQ ID NO: 3 - DNA, 1542 bp, Artificial Sequence
  source: /note="Description of Artificial Sequence: Synthetic polynucleotide"
atgctatcgaagaacttgtatagtaacaagaggttgctcacctcgacgaatacgctagtcagattcgccagcaccagatccacaggcgtcgaaaactccggggctggtcctacatcttttaagaccatgaaagtcattgaccctcagcacagcgacaaacccaacgtgctgatactgggttcgggctggggcgctatctcgtttctgaagcacattgacaccaagaagtacaacgtttccatcatctctcccagaagctacttcttattcacgcctttgctgcccagcgcaccagttgggacagtagacgaaaagtcaattatcgagcccatcgttaacttcgctctcaagaaaaaggggaacgtcacctactatgaggcagaagccacctctatcaatcccgaccggaataccgttaccatcaaatcattatctgccgtgagccagctgtaccaacccgagaaccatctggggctgcatcaagcagaacccgctgagattaagtacgattacttaatcagtgctgtgggcgcggaacccaacacatttggtattcctggggtcaccgattacggtcatttcctgaaggagattcccaactctttggaaataagaagaacttttgccgccaatctggagaaggccaacttactgcctaagggtgatcccgaacggagaagactgctgagcatcgtcgtcgttggtggtggccctactggtgtagaggccgctggcgagctacaggactatgttcaccaggacctgagaaagtttctccctgccttggccgaagaagtccagattcacctggtcgaagctctgcccatcgtgttgaatatgtttgagaagaagctttcatcatacgcgcagtcacatttagaaaacacctcgatcaaagtacatctgagaacggccgtggccaaggttgaagagaagcaattgttggccaagaccaaacacgaggacggcaaaataaccgaagaaactatcccatacggtaccctgatttgggccacgggtaacaaggcaagaccggtaatcaccgaccttttcaagaagatccctgagcaaaacagcagcaagagaggcttggcagtgaacgacttcttgcaggtgaaaggcagcaacaacattttcgccattggtgacaatgcctttgctgggttgccaccaaccgcccaagtagcccaccaagaagccgaatatttggccaagaattttgacaaaatggctcagatcccaaatttccaaaagaatctatcttccagaaaggataaaatcgatctcttgttcgaggaaaacaactttaagcccttcaaatacaacgatttaggtgccctggcctacctgggatccgaaagggccattgcaaccatccgttccggtaagcggacattctacaccggtggtggcttaatgaccttctacttatggagaattctgtacttgtccatgattctatctgccagatcgagattaaaggtgtttttcgactggatcaaactggcattcttcaagagagacttttttaagggactgtag

SEQ ID NO: 4 - DNA, 1542 bp, Artificial Sequence
  source: /note="Description of Artificial Sequence: Synthetic polynucleotide"
atgctgtcgaagaacctgtatagcaacaagaggttgctcacctcgacgaatacgctcgtgcgcttcgcttccaccagatccacaggggtggaaaactccggagctggtcctacatcttttaagaccatgaaagtcattgaccctcagcacagcgacaagccaaacgtgctgatcctgggctctgggtggggagccatctcgtttttaaagcacattgacaccaagaagtacaacgtctccatcatctctcctagaagctatttcttatttacgcctctgttacctagcgcccctgttggaaccgtagacgaaaagtcaatcatcgagcccatcgttaactttgctctcaagaaaaagggcaacgttacctactatgaggcagaagccacctctatcaaccccgacaggaataccgttaccataaaaagcttaagcgccgtgtcccagctataccaacctgagaaccatctagggctgcaccaagccgagcctgctgagattaagtacgattacttaatcagtgctgtaggcgcggagcccaacacctttggtattcctggggtcactgactacggccatttcctgaaggaaattcccaactctctggaaataagaagaacctttgccgccaatctggaaaaggctaacttattgccaaagggtgatcccgaaagaagaagactactgtccattgtggtggttggcggtgggcctacaggtgtagaggccgctggcgaactacaggattatgttcaccaggacctgcggaagttcctccctgcactggccgaggaagtgcaaattcacttggtggaagccctgcccatcgttttgaacatgtttgagaaaaagctgtcatcatacgcgcaaagccatctggaaaacacctcgatcaaagtgcatctgagaaccgctgtcgccaaagtggaagagaagcaattgttggccaagaccaaacacgaagacggtaagataaccgaagaaactattccatacggtaccttgatttgggccaccggcaacaaggcaagaccggtaatcactgaccttttcaagaaaattcctgagcagaacagctccaagcggggattggcagtgaatgactttttgcaggtcaaaggcagcaacaacattttcgccattggtgacaatgcctttgctgggttgccaccaaccgcccaagtggcgcaccaggaggccgaatacttggccaagaattttgataaaatggctcagatcccaaatttccaaaagaacctatcctccagaaaggataagatcgatctcctgttcgaggaaaacaacttcaaacctttcaagtacaacgatttaggtgccttagcatacctgggatccgaaagggccattgcaaccatacgttccggcaagcggaccttttacaccggtggtggcctgatgaccttctacttatggagaattttgtacttgtccatgattctatctgcaagatcgagattaaaggtgtttttcgactggatcaaattagcatttttcaagagagacttcttcaaaggattatga

SEQ ID NO: 5 - DNA, 1542 bp, Artificial Sequence
  source: /note="Description of Artificial Sequence: Synthetic polynucleotide"
atgctgagcaagaacttgtatagcaacaagaggttgctgaccagcaccaacaccctcgtccgcttcgctagcaccagatccacaggggtggaaaactccggagcaggccctacatcttttaagaccatgaaagtcatcgaccctcagcacagcgacaagcccaacgtgctgatactgggctctgggtggggagctatcagctttttaaagcacattgacaccaagaagtacaacgtttccatcatctctcccagaagctatttcttattcacgcctttgctgccttctgcaccagttggaaccgtggacgagaagtcaatcatcgagcccatcgttaattttgctctcaagaaaaaggggaacgttacctactacgaggcagaagccaccagcatcaaccccgacaggaataccgttaccataaaatcattatctgccgtttcccagctataccaacctgaaaaccatctaggcctgcatcaagcagagcctgccgagattaagtacgattacttaatcagtgccgtgggtgcggaacctaacacctttggtatccctggggtcactgattacggccatttcctgaaagaaattcccaacagcttggaaatccggagaacttttgccgccaatctagaaaaggccaacctgttgccaaagggtgatcccgaacggagaagactactgtccatcgtcgtcgttggcggtgggcctacaggcgtagaagccgctggcgaactacaggattacgttcaccaggacctgagaaagtttctgcctgccctggccgaagaagtccaaattcacttggtcgaagccctgcccatcgtgctgaatatgtttgagaaaaagctttcatcatacgcccaaagccatttagaaaacacctcgatcaaagtacatctgagaacggctgtcgccaaagttgaagagaagcaactgttggcaaagaccaaacacgaagacggtaaaataaccgaagaaactattccatacggcactttgatttgggccacgggcaacaaggcaagaccggtgatcactgaccttttcaagaagatccctgagcaaaacagctccaagagaggcttggcagtgaacgactttttgcaggtgaaaggcagcaacaacattttcgccatcggtgacaacgcatttgccggcttgccacctacagcccaagtggcgcaccaagaggccgaatatttggccaagaattttgataagatggcccagataccaaatttccagaagaacctatcttcaagaaaggataaaattgatctcttgttcgaggagaacaactttaaacccttcaaatacaacgatttaggtgccttagcctacctgggatccgaaagagccattgcaaccatacgttccggcaagagaacattctacaccggtggtggcttaatgaccttctacctgtggagaatcttgtacttgagcatgattctatctgcaagatcgagattaaaggtcttcttcgactggattaaattagcattcttcaaaagagacttttttaaaggattatag

SEQ ID NO: 6 - DNA, 1542 bp, Artificial Sequence
  source: /note="Description of Artificial Sequence: Synthetic polynucleotide"
atgctatcgaagaatctgtatagtaacaagcggctgctgacctcgacgaatacgctcgtcagattcgcttccaccagatccaccggcgtggaaaactccggagctggtcctacatctttcaagaccatgaaagtcattgacccccagcacagcgacaaaccaaacgtgctgatactgggttcgggctggggagctatctcgtttttaaagcacattgacaccaagaagtacaacgtttccatcatcagccctagaagctacttcttattcacgcctctgttacctagcgccccagttgggaccgtagacgaaaagtccattattgagcccatcgtgaattttgctctcaagaaaaagggcaacgttacctactatgaggcagaagccacctctatcaaccccgaccggaataccgtgaccataaaatcattaagcgccgttagccagctataccaacctgaaaaccatctgggcctgcaccaagccgaacctgctgaaattaagtacgattatttaatcagtgctgtaggtgccgaacctaacacatttggtatccccggcgtcactgactacggtcatttcctgaaggaaattcccaacagcttggaaatccggagaacttttgccgccaatctagaaaaggctaacttattgccaaagggtgatcccgaaagaagaagactgctgagcattgtcgtggttggcggaggccccacaggtgtagaggccgctggcgaactgcaggactatgtgcaccaggacctgagaaagtttctccctgccctggccgaagaagtgcaaattcacttggtcgaagctctgcccatcgttctgaatatgttcgagaaaaagctttcatcatacgcccagagccatttagaaaacacttcgatcaaagtgcacctgagaaccgccgtcgccaaagttgaagagaagcaattgttggcaaagaccaagcacgaagacggtaaaataaccgaagaaactattccatacggtactctgatttgggccaccggcaacaaggccagacccgtaatcactgacctgttcaagaaaatccccgagcaaaactcgagcaagagaggattggccgtgaacgactttttgcaggtcaaaggcagcaacaacattttcgccattggcgacaatgcctttgccgggttgcctcctacagcccaagtagcgcaccaagaggccgaatacttggccaagaattttgataaaatggcccaaatacccaatttccaaaagaacctatcttccagaaaggataaaatcgacctgttgttcgaggaaaacaacttcaaacctttcaagtacaacgacttaggtgccttagcatacctgggatccgaaagggccattgcaaccatacgttccggtaagagaacattctacaccggtggtggcttaatgaccttctacttatggagaattttgtacttgtccatgattctatctgcaagatcgagactgaaggtctttttcgactggatcaaactggcatttttcaagagagactttttcaaaggattatag

SEQ ID NO: 7 - DNA, 1542 bp, Artificial Sequence
  source: /note="Description of Artificial Sequence: Synthetic polynucleotide"
atgctatcgaagaatttgtatagtaacaagcggttgctcaccagcacgaataccctcgtcagattcgctagcaccagatccacaggggtggaaaactccggggctggtcctacaagctttaagaccatgaaagtcatcgacccccagcacagcgacaaacccaacgtgctgatcctgggttcggggtggggcgccatttcgtttttaaagcacattgacaccaagaagtacaacgtttccatcatctctcctagaagctatttcttatttacgcctttgttacctagcgcaccagttgggacagtggacgaaaagtcaatcatcgagcccatcgttaattttgctctcaagaaaaagggcaacgttacctactatgaggcagaagccacctctatcaatcccgaccggaataccgttaccataaagtcattaagcgccgttagccagctataccaacccgagaaccacctagggctgcatcaagcagaacccgctgagattaagtacgattatttaatcagtgctgtaggtgcggaacctaacacatttggaattcctggggtgactgattacggtcacttcctgaaggagatccccaactctttggaaataagaagaactttcgccgccaatctggagaaggctaacctgttgccaaagggtgatcccgaaagaagaagactgctgagcattgtcgtggtgggtggtgggcccacaggtgtggaggctgctggtgaactacaggattacgttcaccaggacctgagaaagtttctccctgcactggccgaagaagtccagattcacttggtcgaagccctgcccatcgttctgaatatgtttgagaagaagcttagcagctacgcccagagccatctggaaaacacttcgatcaaagtgcatctgagaacggctgtcgccaaggttgaagaaaagcagttgttggcaaagaccaaacacgaagacggtaaaattaccgaggaaactatcccatacggcactctgatttgggccacgggtaacaaggcaagaccggtaatcaccgacctgttcaagaagattcccgagcaaaactcgtccaagagaggattggcagtgaacgactttctgcaggtcaaaggcagcaacaacatcttcgccattggtgacaatgcctttgccggcctgcctccaaccgcccaagtagcgcaccaagaggccgaatatttggccaagaatttcgacaagatggctcagatcccaaatttccaaaagaatctatcctcaagaaaggataaaatcgatctcttgttcgaggagaacaactttaaacctttcaaatacaacgacttaggtgccttagcctacctgggaagcgaaagggccattgccaccataagaagcggcaagagaacattctacaccggtggtggcctgatgaccttctacctgtggcggattctgtacctgtccatgattctatctgcaagatcgagattaaaggtctttttcgactggatcaaactggcctttttcaaaagagacttttttaaaggcttatga

SEQ ID NO: 8 - DNA, 1542 bp, Artificial Sequence
  source: /note="Description of Artificial Sequence: Synthetic polynucleotide"
atgctatcgaagaatttgtacagtaacaagaggttgctgacctcgaccaacacgctcgtcagattcgcttccaccagatccacaggggtggaaaactccggagctggtcccacatctttcaagaccatgaaagtcattgaccctcagcacagcgacaaaccaaacgtgctgatactgggctcggggtggggagctattagctttttaaagcacattgacaccaagaagtacaacgtcagcatcatcagccctagaagctatttcttatttacccccttgttacctagcgcaccagttgggacagtggacgaaaagtcaattattgagcccatcgttaactttgctctgaagaaaaaggggaacgttacctactatgaggcagaagccacctctatcaatcccgacaggaacaccgttaccatcaaatcactgtctgccgttagccagctataccaacctgaaaaccacctagggctgcaccaagcagaacctgccgaaattaagtacgattacttaatcagtgctgtgggtgcggaacctaacacatttggtattcctggggtcaccgattacggccatttcctgaaggaaattcccaacagcttggaaataagaagaactttcgccgccaatctagagaaggctaacctgctgccaaagggcgatcccgagcggagaagactactgtccattgtggtggttggtggagggcctactggtgtggaggccgctggcgaactacaggactatgttcaccaggacctgcggaagtttctccccgccctggccgaggaagtccaaattcacttggtcgaagccctgcccatcgttttgaatatgtttgagaagaagctttcaagctacgcgcagtcacatttagaaaacacttcgatcaaggtacacctgagaaccgccgtcgccaaggttgaagaaaagcaattgttggcaaagaccaaacacgaagacggtaagataaccgaagaaactattccctacggtactttgatttgggccaccggcaacaaggcaagaccggtaatcactgaccttttcaagaaaatccctgagcagaactcgtccaagagaggcttggcagtgaacgactttttgcaggtgaaaggcagcaacaacatcttcgccattggtgacaacgcatttgccgggttgccaccaacagcccaagtagcgcaccaagaggccgaatatctggccaagaattttgataagatggcccaaatccccaatttccaaaagaacctgtcctcacggaaggataaaatcgatctcttgttcgaggagaacaacttcaagcccttcaaatacaacgacttaggtgccctggcctacctgggctccgaaagggccattgcaaccatcagaagcggtaagcggacattttacaccggtggtggcctgatgaccttctacttatggagaatcttgtacctgtccatgatcctatctgcacgcagcagactgaaggtctttttcgactggatcaaattagcatttttcaaaagggacttctttaagggattatga

SEQ ID NO: 9 - DNA, 1542 bp, Artificial Sequence
  source: /note="Description of Artificial Sequence: Synthetic polynucleotide"
atgctatcgaagaacttgtatagcaacaagaggttgctcacctcgacgaatacgctcgtcagattcgcctccaccagatccaccggggtcgaaaactccggggcaggtcccacctcttttaagaccatgaaagtcattgaccctcagcacagcgacaaaccaaacgtgctgatactgggttctgggtggggagctatttcgtttctgaagcacattgacaccaagaagtacaacgtctccatcatctctcctagaagctatttcttattcacgcctttgttaccttctgcaccagtgggaacagtggacgaaaagtcaatcatcgagcccatcgtgaatttcgctctgaagaaaaaggggaacgtcacctactatgaggcagaagccaccagcatcaatcccgaccggaataccgttaccatcaaatcattatctgccgttagccagctgtaccaacctgaaaaccatctagggctgcaccaagcagagcccgccgaaattaagtacgattacttaatcagcgctgtaggtgcggaacctaacacatttggaatccctggcgtgactgattacggtcatttcctgaaggaaatccccaacagcttggaaatcagaagaacctttgccgccaatctggagaaggccaacttattgccaaagggtgatcccgaaagaagaaggctactgagcatcgtcgtcgttggtggaggccccactggcgtagaagccgctggtgagctgcaggattatgtgcaccaggacctgcggaagtttctccccgcattggccgaggaagtccaaattcacttggtcgaagccctgcccatcgttctgaacatgtttgagaaaaagctgtcatcatacgcgcaaagccacctggaaaacacctcgatcaaggtgcatctgagaaccgccgtcgccaaagttgaagagaagcaattgttggcaaagaccaaacacgaagacggcaaaataaccgaagaaactatcccctacggtactctgatttgggccacgggcaacaaggcaagacccgtaatcactgaccttttcaagaaaatccccgagcaaaactcgtccaagagaggattggcagtgaatgacttcttgcaggtgaaaggcagcaacaacattttcgccattggtgacaacgcatttgctgggttgccaccaaccgcccaggtagcgcaccaggaggccgaatacttggccaagaattttgataaaatggctcagataccaaatttccagaagaatctatcttcacggaaggataaaattgatctcttgttcgaggagaacaacttcaagcctttcaaatacaacgatttaggtgccttagcatacctgggctccgaaagagccattgcaaccatacgtagcggtaagagaaccttttacaccggtggtggcctgatgaccttctacttatggagaattttgtacctgtccatgattctatctgcacgctcgagattaaaggtctttttcgactggatcaaattagcctttttcaagagagactttttcaaaggcttatag

SEQ ID NO: 10 - DNA, 1542 bp, Artificial Sequence
  source: /note="Description of Artificial Sequence: Synthetic polynucleotide"
atgctaagcaagaatttgtatagtaacaagaggttgctgacctcgacgaacacgctagtgagattcgcttccaccagatccacaggggtcgaaaactccggagcaggtcctaccagcttcaagaccatgaaggtcattgaccctcagcacagcgacaagccaaacgtgctgatactgggttcggggtggggcgctattagctttttaaagcacattgacaccaagaagtacaacgtctccatcatctctcccagaagctacttcttatttacgcctctgttacctagcgcaccagttgggaccgtagacgaaaagtcaattatcgagcccatcgttaacttcgctctcaagaaaaagggcaacgttacctactatgaggcagaggccacctctatcaatcccgaccggaataccgttaccataaaaagcctgtctgccgtgtcccagctataccaacctgagaaccacctgggcctgcatcaagccgaacctgccgagattaagtacgattatctgatcagcgctgtgggtgcggaacccaacacatttggtattcccggggtgactgattacggccatttcctgaaggagattcccaactctttggaaataagaagaacttttgccgccaatctggagaaggccaacctgttgccaaagggtgatcccgagcggagaaggctactgagcattgtcgtcgttggtggtgggcctacaggtgtagaggccgctggtgaactgcaggactacgttcaccaggacctgagaaagttcctgcctgcattggccgaagaagtccaaattcacttggtcgaagccctgcccatcgttttgaatatgtttgagaaaaagcttagctcatacgcgcagtcacatttagaaaacacttccatcaaagtacatctgagaacggctgtggccaaggttgaagagaagcaattgttggccaagaccaaacacgaagacggtaagattaccgaagaaactattccatacggtactttgatttgggccacgggcaacaaggccagaccggtaatcaccgaccttttcaagaagattcctgagcaaaacagctccaagagaggattggcagtgaatgactttctgcaggtgaaaggcagcaacaacattttcgccattggtgacaatgcctttgccggcctgcctccaaccgcccaagtagcgcaccaagaggccgaatatttggccaagaattttgataagatggctcaaataccaaatttccaaaagaatctatcctcaagaaaggataaaatcgacctcttgttcgaggagaacaacttcaagcctttcaaatacaacgatttaggcgccttagcctacctgggatccgaaagggccattgcaaccataagatccggtaagagaaccttttacaccggtggtggcttaatgaccttctacctgtggcggatcctgtacctgtccatgattctatctgcaagaagcagactgaaggtctttttcgactggattaaactggccttcttcaaaagagacttttttaaaggcttatga

SEQ ID NO: 11 - DNA, 1542 bp, Artificial Sequence
  source: /note="Description of Artificial Sequence: Synthetic polynucleotide"
atgctgtcgaagaatttgtacagtaacaagcggctgctcacctcgacgaataccctcgtcagattcgcttccaccagatccacaggggtcgaaaacagcggagcaggccctacaagctttaagaccatgaaggtcattgacccccagcacagcgacaagccaaacgtgctgatcctgggttcggggtggggagctatttcgtttttaaagcacattgacaccaagaagtacaacgttagcatcatctctcctagaagctatttcttattcacccccctgttaccctctgcacctgttgggacagtagacgaaaagtcaatcattgagcccatcgttaattttgccctcaagaaaaaggggaacgttacctactacgaggcagaggccaccagcatcaatcccgacaggaataccgttaccataaagtcattatctgccgttagccagctgtaccagcctgagaaccatctagggctgcatcaagcagaacccgctgaaattaagtacgactacctgatcagtgctgtaggtgcggaacctaacacatttggtattcccggggtcactgattacggtcacttcctgaaggaaatccccaactctctggaaataagaagaaccttcgccgccaatctggagaaggctaacttattgccaaagggtgaccccgaacggagaagactactgagcattgtggtggttggtggtgggcccactggtgtagaggccgctggcgaactacaggattatgttcaccaggacctgagaaagttcctgcccgccttggccgaagaagtccaaattcacttggtcgaagctctgcccatcgttctgaacatgttcgagaagaagctgtcaagctacgcccaatcacacttagaaaacacttccatcaaggtacatctgagaacggctgtggccaaggtggaagaaaagcaattgctggccaagaccaagcacgaagacggtaaaataaccgaggaaactattccatacggcaccctgatttgggccaccggtaacaaggcaagaccggtaatcactgaccttttcaagaaaattcctgagcaaaactcgagcaagcggggattggcagtgaatgactttttgcaggtgaaaggcagcaacaacattttcgccattggtgacaatgcatttgctgggttgccacctaccgcccaggtggcccaccaggaggccgaatacttggccaagaactttgacaaaatggctcaaatacccaatttccaaaagaatctgtcttcccggaaggataagattgatctcctgttcgaggagaacaactttaaacctttcaaatacaacgatttaggtgccttagcatacctgggatccgaaagagccattgcaaccatacgttccggtaagagaacattttacaccggcggaggcttaatgaccttctacctgtggagaattctgtacctgagcatgatcctgtctgcaagatcgagattaaaggtctttttcgactggatcaaattagcatttttcaaaagggacttttttaaaggactgtag

SEQ ID NO: 12 - DNA, 1542 bp, Artificial Sequence
  source: /note="Description of Artificial Sequence: Synthetic polynucleotide"
atgctatcgaagaatttgtacagtaacaagaggttgctcaccagcaccaacacgctagtgcgcttcgctagcaccagatccacaggcgtggaaaactccggagcaggtcctacatctttcaagaccatgaaagtcattgaccctcagcacagcgacaaaccaaacgtgctgatactgggctcgggctggggagctattagctttttaaagcacattgacaccaagaagtacaacgtttccatcatctctcctagaagctacttcttatttacgcccttgttaccttctgcaccagtgggaacagtagacgaaaagtcaattatcgagcccatcgttaattttgctctcaagaaaaaggggaacgttacctactacgaggcagaggccacctctatcaatcccgacaggaataccgttaccataaagagcttatctgccgttagccagctgtaccagcctgaaaaccacctagggctgcaccaggcagagcctgctgaaattaagtacgattatctgatcagtgctgtaggcgcggaacccaacacatttggaatccccggggtgactgactacggtcatttcctgaaggaaattcccaactctctggaaataagacggactttcgccgccaacctagagaaggctaacttattgcctaagggtgatcccgaacggagaagactgctgtccattgtcgtggttggtggtgggcccacaggtgtggaggccgctggtgaactacaggattacgttcaccaggacctgcggaagtttctgcctgcattggccgaagaagtgcagattcacttggtggaagccctgcccatcgtgttgaatatgtttgagaagaagctttcaagctacgcgcaaagccatttagaaaacacctcgatcaaagtacatctgagaacggccgtggccaaagttgaagaaaagcagttgttggcaaagaccaagcacgaggacggcaaaataaccgaagaaactattccctacggtactttgatttgggccacgggtaacaaggcaagaccggtaatcactgaccttttcaagaaaattcctgagcaaaactcgtccaagcggggattggccgtgaatgactttttgcaggtcaaaggcagcaacaacattttcgccatcggtgacaacgcatttgccgggttgccaccaacagcccaagtagcccaccaagaggccgaatatttggccaagaatttcgataagatggctcaaatcccaaatttccagaagaatctgtcttcacggaaggataaaattgacctcttgttcgaggagaacaactttaaacctttcaagtacaacgacttaggtgccctggcatacctgggaagcgaaagggccattgccaccataagatccggtaagcggacattttacaccggcggaggcttaatgaccttctacctgtggagaattttgtacttgtccatgattctgagcgccagatcgagattaaaggtcttcttcgactggatcaagttagcatttttcaaaagggactttttcaagggactgtga

SEQ ID NO: 13 - DNA, 1542 bp, Artificial Sequence
  source: /note="Description of Artificial Sequence: Synthetic polynucleotide"
atgctgtcgaagaatttgtatagcaacaagaggctgctcacctcgacgaacacgctagtgagattcgcttccaccagatccacaggcgtggaaaactccggagctggtcccacaagctttaagaccatgaaagtcatcgaccctcagcacagcgacaaacccaacgtgctgatactgggctcggggtggggagccattagctttttaaagcacattgacaccaagaagtacaacgttagcatcatcagccctagaagctacttcttatttacccctttgttaccttctgcacctgttgggaccgtggacgaaaagtccatcattgagcccatcgttaatttcgctctgaagaaaaaggggaacgtcacctactatgaggcagaagccaccagcatcaatcccgaccggaacaccgtgaccataaaaagcttaagcgccgtttcccagctataccaacctgagaaccatctggggctgcatcaagccgaacctgctgaaattaagtacgattatttaatcagcgctgtaggtgcggaacctaacacatttggtatccctggggtgactgattacggtcatttcctgaaagaaattcccaactctttggaaataagaagaactttcgccgccaatctagagaaggctaacttattgcctaagggtgatcccgaaagaagaagactactgtccattgtcgtggttggtggagggcctactggtgtagaagccgctggtgaactacaggactatgttcaccaggacctgagaaagttcctccccgccctggccgaagaagtccagattcacctggtcgaagctctgcccatcgttttgaatatgtttgagaaaaagcttagctcatacgcgcaaagccacttagaaaacacctccatcaaagtgcacctgagaaccgctgtcgccaaagttgaagaaaagcaattgctggcaaagaccaaacacgaagacggtaagataaccgaagaaaccattccatacggtaccttgatttgggccaccggcaacaaggcaagaccggtgatcactgacctgttcaagaaaattcctgagcaaaactcgtccaagagaggcttggcagtgaatgactttttgcaggtgaaaggcagcaacaacattttcgccatcggcgacaacgcatttgctggcctgcctccaaccgcccaagtagcgcaccaagaggccgagtacttggccaagaacttcgacaaaatggctcaaataccaaatttccaaaagaatctatcttcaagaaaggataaaatcgacctcctgttcgaggagaacaactttaaacctttcaaatacaacgatctgggcgccttagcctacctgggctccgaaagggccattgccaccatacgtagcggcaagagaaccttttacaccggtggaggcttaatgaccttctacttatggagaattctgtacttgtccatgatcctaagcgcaagaagcagattaaaggtctttttcgactggattaaattagcctttttcaaaagggacttctttaagggcttatag

SEQ ID NO: 14 - DNA, 1542 bp, Artificial Sequence
  source: /note="Description of Artificial Sequence: Synthetic polynucleotide"
atgctatcgaagaatttgtatagtaacaagaggttgctgacctcgaccaatacgctagtcagattcgcttccaccagatccacaggggtggaaaactccggggcaggccctacatctttcaagaccatgaaggtcatcgacccccagcacagcgacaaaccaaacgtgctgatactgggttctgggtggggcgccatttcgtttttaaagcacatcgacaccaagaagtacaacgtctccatcatctctcctagaagctatttcttattcacgcctctgttaccctctgcccctgttgggaccgtagacgagaagtcaattatcgagcccatcgtgaactttgctctcaagaaaaaggggaacgtcacctactacgaggccgaagccaccagcatcaatcccgaccggaataccgttaccataaaatcattatctgccgttagccagctataccaacctgagaaccatctagggctgcatcaagcagaacctgccgagattaagtacgactatctgatcagcgccgtaggtgccgaacctaacacctttggtattcctggggtcactgattacggtcatttcctgaaggagattcccaactctttggaaatcagaagaacttttgccgccaatctagagaaggctaacttactgccaaagggcgatcccgaaagaagaagactactgtccattgtcgtggtgggtggtgggcctactggcgtagaagccgctggcgagctgcaggattatgttcaccaggacctgagaaagtttctccctgccttggccgaagaagtccaaattcacttggtggaagctctgcccatcgtgttgaacatgttcgagaaaaagctttcatcatacgcccaatcacacttagaaaacacttcgatcaaagtgcatctgagaacggctgtcgccaaagttgaagagaagcaactgctggccaagaccaagcacgaagacggtaaaattaccgaggaaaccattccctacggtactttgatttgggccacgggcaacaaggccagaccggtaatcaccgaccttttcaagaaaattcctgagcaaaacagctccaagagaggcctggcagtgaatgactttttgcaggtgaaaggcagcaacaacatcttcgccattggtgacaatgcatttgccggcttgccaccaaccgcccaggtagcgcaccaagaagccgagtacctggccaagaattttgataaaatggctcaaatacccaatttccagaagaatctgtcctccagaaaggataaaattgatctcctgttcgaggagaacaactttaagcctttcaaatacaacgatttaggcgccctggcctacctgggctccgaaagagccattgccaccatacgttccggtaagagaacattttacaccggtggtggcttaatgaccttctacttatggcggattttgtacttgagcatgattctatctgcaagaagcagattaaaggtctttttcgactggattaagctggcctttttcaaaagagacttctttaaaggactgtga

SEQ ID NO: 15 - DNA, 1542 bp, Artificial Sequence
  source: /note="Description of Artificial Sequence: Synthetic polynucleotide"
atgctatcgaagaatctgtatagtaacaagaggctgctcaccagcacgaataccctagtccgcttcgcctccaccagatccaccggcgtggaaaactccggagcaggtcctacatcttttaagaccatgaaggtcatcgacccccagcacagcgacaaaccaaacgtgctgatactgggttcgggctggggcgctatttcgtttttaaagcacattgacaccaagaagtacaacgtttccatcatcagccccagaagctatttcttatttacgcctttgttaccttctgcccctgttgggaccgtagacgaaaagtcaattatcgagcccatcgtgaatttcgctctcaagaaaaagggcaacgttacctactatgaggcagaagccacctctatcaatcccgaccggaacaccgttaccataaagagcttatctgccgttagccagctataccagcctgaaaaccatctggggctgcatcaagcagagcccgctgaaattaagtacgattatctgatcagtgctgtaggtgccgaacctaacacatttggtattcctggcgtcactgactacggtcacttcctgaaagaaattcccaactctttggaaatacggagaactttcgccgccaacctggagaaggccaacctgttgcctaagggtgatcccgaaagaagaagactactgtccattgtggtggttggtggtggccctactggtgtggaggctgctggtgagctacaggattatgttcaccaggacctgagaaagtttctccctgcattggccgaagaagtgcaaattcacttggtcgaagccctgcccatcgttctgaatatgtttgagaaaaagcttagcagctacgcccaaagccacttagaaaacacctccatcaaagtacacctgagaaccgctgtcgccaaagtggaagaaaagcaattgttggcaaagaccaaacacgaggacggtaagattaccgaggaaactattccctacggtactttgatttgggccaccggtaacaaggcaagacccgtaatcactgaccttttcaagaagattcctgagcagaacagcagcaagagaggattggccgtgaacgacttcctgcaggtgaaaggcagcaacaacatcttcgccattggcgacaacgcctttgctgggttgccaccaaccgcccaagtagcccaccaagaggccgaatatttggccaagaatttcgataagatggctcaaatacccaatttccaaaagaatctgtcctcaagaaaggataaaatcgatctcttgttcgaggaaaacaactttaagcccttcaaatacaacgatttaggtgccctggcatacctgggatccgaaagggccattgcaaccataagatccggcaagagaacattttacaccggcggaggcttaatgaccttctacctgtggagaattttgtacctgtccatgattctaagcgcaagatcgagattaaaggtcttcttcgactggatcaaattagcatttttcaaaagagacttttttaaaggattatag

SEQ ID NO: 16 - DNA, 1542 bp, Artificial Sequence
  source: /note="Description of Artificial Sequence: Synthetic polynucleotide"
atgctgagcaagaacctgtatagtaacaagcggttgctgacctcgaccaataccctcgtcagattcgcttccaccagatccacaggggtggaaaactccggggcaggccctacctctttcaagaccatgaaagtcattgaccctcagcacagcgacaagccaaacgtgctgatactgggttcggggtggggagccatttcgtttttaaagcacattgacaccaagaagtacaacgttagcatcatctctcctagaagctatttcctgtttacgcctttgttaccctctgcaccagttgggacagtggacgaaaagtcaatcattgagcccatcgtgaattttgctctcaagaaaaagggcaacgttacctactatgaggcagaagccacctctatcaaccccgacaggaacaccgtgaccataaaaagcttatctgccgttagccagctataccaacctgaaaaccatctggggctgcatcaagcagaacctgctgaaattaagtacgattacctgatcagtgccgtgggcgcggaacccaacacatttggtatccctggcgtcactgattacggtcatttcctgaaggagatccccaactctttggaaatacggagaacttttgccgccaatctagagaaggctaacctgctgccaaagggtgaccccgaaagaagaagactgctgtccatcgtcgtcgttggtggagggcctactggtgtagaggccgctggtgaactgcaggattatgttcaccaggacctgcggaagttcctccccgcattggccgaggaagtccagattcacttggtcgaagctctgcccatcgttctgaacatgtttgagaaaaagctttcatcatacgcccagtcacacctggaaaacacttcgatcaaggtacatctgagaacggctgtcgccaaggttgaagaaaagcaactgctggcaaagaccaaacacgaagacggtaagataaccgaagaaaccattccctacggcactctgatttgggccacgggtaacaaggcaagaccggtaatcaccgaccttttcaagaagattcctgagcagaacagctccaagcggggattggcagtgaatgactttctgcaggtgaaaggcagcaacaacattttcgccattggtgacaacgcctttgctgggctgccaccaacagcccaagtagcgcaccaggaagccgaatatttggccaagaacttcgataagatggctcagatcccaaatttccaaaagaatctatcctcaagaaaggataaaattgatctcctgttcgaggagaacaactttaagcccttcaagtacaacgatttaggtgccctggcctacctgggatccgaaagggccattgcaaccatccgttccggtaagagaaccttttacaccggtggaggcctgatgaccttctacttatggagaattttgtacttgtccatgattctatctgcacgctcgagactgaaggtctttttcgactggattaaattagcctttttcaaaagggacttctttaagggattatag

SEQ ID NO: 17 - DNA, 1542 bp, Artificial Sequence
  source: /note="Description of Artificial Sequence: Synthetic polynucleotide"
atgctaagcaagaatttgtatagtaacaagaggttgctgaccagcacgaatacgctagtccgcttcgcttccaccagatccaccggggtggaaaactccggggcaggccctacatctttcaagaccatgaaagtcattgaccctcagcacagcgacaagcccaacgtgctgatactgggttcggggtggggagctatctcgtttctgaagcacattgacaccaagaagtacaacgtttccatcatcagccctagaagctacttcttatttacgcctctgttaccttctgcaccagtgggaacagtggacgaaaagtccatcatcgagcccatcgttaacttcgccctcaagaaaaagggcaacgtcacctactatgaggcagaagccacctctatcaatcccgacaggaataccgtgaccataaaaagcttaagcgccgttagccagctgtaccagcctgaaaaccatctgggcctgcatcaggcagaacctgccgaaattaagtacgattatctgatcagtgctgtaggtgcggaacccaacacatttggtattcctggggtgaccgattacggccatttcctgaaggaaattcccaactctttggaaataagacggacttttgccgccaatctggagaaggctaacttactgccaaagggtgatcccgaaagaagaaggctactgtccatcgtcgtggtgggtggtgggcctactggtgtagaggccgctggtgaactacaggattatgtgcaccaggacctgagaaagtttctgcctgcactggccgaagaagtccaaattcacttggtggaagctctgcccatcgttttgaatatgtttgagaaaaagctgagctcatacgcgcaaagccacctggaaaacacctcgatcaaggtacatctgagaaccgctgtcgccaaggttgaagaaaagcaattgttggccaagaccaagcacgaggacggcaagataaccgaagaaactatcccctacggcactctgatttgggccaccggcaacaaggcaagacccgtaatcactgacctgttcaagaaaattcccgagcaaaactcgtccaagagaggattggcagtgaatgactttttgcaggtcaaaggcagcaacaacattttcgccatcggtgacaatgcctttgctgggttgccacctaccgcccaagtagcgcaccaagaagccgaatacttggccaagaatttcgacaaaatggctcaaataccaaatttccaaaagaatctgtcctccagaaaggataagatcgatctcttgttcgaggaaaacaactttaaacctttcaaatacaacgatttaggtgccttagcatacctgggaagcgaaagagccattgcaaccataagaagcggtaagagaacattttacaccggtggaggcttaatgaccttctacttatggagaatcttgtacctgtccatgattctatctgcacgcagcagattaaaggtcttcttcgactggattaaattagcatttttcaagagagacttttttaagggcttatag

SEQ ID NO: 18 - DNA, 1542 bp, Artificial Sequence
  source: /note="Description of Artificial Sequence: Synthetic polynucleotide"
atgctaagcaagaatttgtatagtaacaagcggttgctcacctcgacgaacaccctagtcagattcgcttccaccagatccacaggggtcgaaaacagcggagcaggtcctacatctttcaagaccatgaaagtcattgacccccagcacagcgacaaacccaacgtgctgatactgggttcgggctggggagctatcagctttttaaagcacatcgacaccaagaagtacaacgtttccatcatctctcctagaagctatttcctgtttacgcccttgttaccttctgcaccagtggggacagtggacgaaaagtccattatcgagcccatcgttaatttcgctctcaagaaaaagggcaacgttacctactatgaggcagaggccaccagcatcaatcccgaccggaataccgttaccataaagtcactgtctgccgtttcccagctataccaacctgaaaaccatctaggcctgcatcaggcagaacccgccgaaattaagtacgattatttaatcagtgctgtaggcgcggaacccaacacatttggtattcccggcgtcactgactacggtcatttcctgaaagagattcccaactctttggaaataagacggacttttgccgccaatctagagaaggccaacttattgccaaagggtgatcccgaaagaagaagactactgtccatcgtcgtggttggtggtgggcctacaggtgtagaggccgctggtgaactgcaggattatgttcaccaggacctgagaaagtttctgcctgcactggccgaggaagtccaaattcacctggtcgaagctctgcccatcgtgttgaatatgttcgagaagaagcttagctcatacgcccaaagccatttagaaaacacttcgatcaaggtgcacctgagaacggctgtggccaaagtggaagaaaagcagctgctggccaagaccaaacacgaagacggtaaaataaccgaagaaactatcccatacggtactctgatttgggccaccggtaacaaggcaagacccgtaatcactgaccttttcaagaagattcctgagcaaaactcgtccaagagaggattggcagtgaatgacttcttgcaggtcaaaggcagcaacaacattttcgccatcggtgacaatgcctttgctggcctgccacctaccgcccaagtagcgcaccaggaggccgagtatctggccaagaatttcgataagatggcccagataccaaatttccaaaagaatctgtcttcaagaaaggataaaattgatctgctgttcgaggaaaacaacttcaaacctttcaaatacaacgatttaggtgccctggcatacctgggaagcgaaagagccattgcaaccatacgttccggtaagagaaccttttacaccggtggtggcttaatgaccttctacttatggagaatcctgtacttgtccatgatcctgagcgccagatcgagattaaaggtctttttcgactggattaaattagcatttttcaaaagagacttttttaagggcctgtga

SEQ ID NO: 19 - DNA, 1542 bp, Artificial Sequence
  source: /note="Description of Artificial Sequence: Synthetic polynucleotide"
atgctatcgaagaatctgtacagtaacaagaggttgctcacctcgaccaacacgctcgtcagattcgcttccaccagatccacaggggtggaaaactccggagctggtcctacatctttcaagaccatgaaggtcattgaccctcagcacagcgacaagccaaacgtgctgatactgggctcggggtggggcgctatcagctttctgaagcacattgacaccaagaagtacaacgtcagcatcatcagccctagaagctacttcttatttacgcctctgttacctagcgccccagttgggacagtagacgaaaagtcaattattgagcccatcgttaattttgccctcaagaaaaaggggaacgttacctactacgaggcagaagccacctctatcaatcccgacaggaataccgttaccataaaaagcctgtctgccgttagccagctgtaccaacctgaaaaccatctagggctgcatcaagccgaacctgctgaaattaagtacgattatctgatcagcgctgtgggtgcggaacccaacacctttggtatccccggggtcactgattacggccatttcctgaaagagattcccaactctttggaaatcagaagaacttttgccgccaatctagagaaggctaacttactgccaaagggtgatcccgagagaagaaggctactgtccattgtcgtcgttggtggaggccctactggcgtggaggctgctggcgaactacaggactatgttcaccaggacctgcggaagtttctccccgcactggccgaggaagtgcaaattcacttggtcgaagccctgcccatcgtgctgaatatgttcgagaaaaagcttagctcatacgcgcaaagccatttagaaaacacctccatcaaagtacacctgagaaccgctgtggccaaggtggaagagaagcagttgttggcaaagaccaaacacgaagacggtaagattaccgaagaaactattccatacggtaccttgatttgggccacgggcaacaaggcaagaccggtaatcaccgaccttttcaagaaaattcccgagcagaactcgtccaagcggggattggcagtgaatgactttttgcaggtgaaaggcagcaacaacattttcgccatcggcgacaatgcatttgctggcttgccaccaacagcccaagtagcgcaccaagaggccgaatatctggccaagaatttcgataaaatggctcaaataccaaatttccaaaagaacctatcttccagaaaggataaaatcgatctcttgttcgaggagaacaacttcaaacctttcaaatacaacgatttaggcgccttagcatacctgggcagcgaaagggccattgcaaccataagatccggtaagagaaccttttacaccggtggtggcttaatgaccttctacctgtggcggattttgtacttgtccatgattctatctgccagaagcagattaaaggtctttttcgactggattaaactggcatttttcaaaagggacttctttaaaggattatga

SEQ ID NO: 20 - DNA, 1542 bp, Artificial Sequence
  source: /note="Description of Artificial Sequence: Synthetic polynucleotide"
atgctaagcaagaatttgtatagtaacaagaggttgctgacctcgacgaataccctagtcagattcgcttccaccagatccacaggcgtggaaaactccggagctggccctacctcttttaagaccatgaaagtcattgacccccagcacagcgacaaaccaaacgtgctgatactgggttcggggtggggcgccatctcgtttttaaagcacatcgacaccaagaagtacaacgtctccatcatctctcctagaagctatttcttattcacgcctctgttaccctctgccccagtggggaccgtagacgaaaagtccattattgagcccatcgttaattttgccctgaagaaaaaggggaacgttacctactatgaggccgaggccacctctatcaatcccgaccggaataccgtgaccataaaatcactgagcgccgttagccagctataccaacccgaaaaccatctagggctgcaccaggcagaacctgccgagattaagtacgattacctgatcagtgctgtgggtgccgagcctaacacatttggtattcctggggtcactgattacggtcacttcctgaaggaaattcccaactctttggaaataagacggacttttgccgccaatctagagaaggccaacttattgccaaagggtgatcccgaaagaagaagactactgagcattgtcgtggttggtggtgggcccactggtgtggaggccgctggtgaactacaggattatgtgcaccaggacctgagaaagttcctgcctgcattggccgaagaagtccaaattcacctggtcgaagccctgcccatcgttttgaatatgtttgagaagaagctgtcatcatacgcgcaatcacatttagaaaacacttcgatcaaagtacacctgagaacggctgtcgccaaagttgaagaaaagcaactgctggccaagaccaaacacgaagacggcaaaataaccgaagaaactatcccatacggtactttgatttgggccacgggcaacaaggcaagaccggtaatcactgaccttttcaagaagatccctgagcaaaacagcagcaagagaggcttggccgtgaatgactttttgcaggtgaaaggcagcaacaacattttcgccatcggtgacaacgcatttgctggcctgccacctaccgcccaggtagcgcaccaggaagccgaatatttggccaagaatttcgataaaatggcccagatcccaaatttccagaagaacctgtcttcaagaaaggataagatcgatctgctgttcgaggagaacaactttaagcctttcaagtacaacgacctgggtgccttagcatacctgggaagcgaaagggccattgccaccatacgttccggtaagagaacattttacaccggcggaggcttaatgaccttctacctgtggagaattctgtacttgtccatgattctgagcgcaagatcgagattaaaggtcttcttcgactggattaaattagcatttttcaagagggacttcttcaaaggattatag

SEQ ID NO: 21 - DNA, 1542 bp, Artificial Sequence
  source: /note="Description of Artificial Sequence: Synthetic polynucleotide"
atgctaagcaagaacttgtatagtaacaagcggttgctgaccagcacgaatacgctagtcagattcgcttccaccagatccaccggcgtggaaaacagcggggcaggccctacaagctttaagaccatgaaggtcattgacccccagcacagcgacaaaccaaacgtgctgatactgggttcggggtggggagctatttcgtttttaaagcacatcgacaccaagaagtacaacgtttccatcatctctcctagaagctacttcctgtttacgcctctgttaccttctgccccagttgggacagtggacgaaaagtccatcatcgagcccatcgtgaattttgctctcaagaaaaagggcaacgtcacctactacgaggcagaagccacctctatcaaccccgacaggaataccgtgaccataaaatcattatctgccgtttcccagctgtaccaacctgaaaaccatctagggctgcatcaagccgagcccgctgagattaagtacgattatttaatcagtgccgtaggcgcggagcctaacacctttggtattcctggggtcactgattacggtcatttcctgaaagaaattcccaactctctggaaataagaagaacttttgccgccaatctggagaaggccaacctgttgccaaagggtgatcccgagcggagaagactgctgtccattgtcgtggtgggcggtgggcctacaggtgtggaagccgctggtgagctacaggactatgttcaccaggacctgcggaagtttctccctgccttggccgaagaagtccagattcacttggtcgaagctctgcccatcgtgttgaacatgtttgagaaaaagctgtcatcatacgcgcagagccacttagaaaacacttccatcaaagtacacctgagaacggctgtcgccaaagttgaagagaagcaattgttggcaaagaccaaacacgaagacggcaaaataaccgaagaaactattccctacggtactctgatttgggccaccggtaacaaggcaagaccggtaatcactgacctgttcaagaaaatccctgagcagaactcgtccaagcggggattggcagtgaatgactttttgcaggtgaaaggcagcaacaacattttcgccattggcgacaatgcatttgctgggttgccaccaacagcccaagtagcgcaccaagaggccgaatatttggccaagaactttgataaaatggctcaaataccaaatttccaaaagaatctgtcctcaagaaaggataaaattgatctgttgttcgaggagaacaactttaaacctttcaagtacaacgatctgggtgccttagcatacctgggatccgaaagggccattgccaccataagatccggtaagcggaccttctacaccggtggaggcttaatgaccttctacctgtggagaattttgtacctgtccatgatcctatctgcaagatcgagattaaaggtgttcttcgactggatcaagttagcatttttcaaaagggacttcttcaagggcttatga

SEQ ID NO: 22 - DNA, 1542 bp, Artificial Sequence
  source: /note="Description of Artificial Sequence: Synthetic polynucleotide"
atgctaagcaagaacttgtatagtaacaagcggttgctcaccagcaccaacaccctcgtgcgcttcgccagcaccagatccaccggcgtcgaaaacagcggggctggccccaccagctttaagaccatgaaggtcattgacccccagcacagcgacaagcccaacgtgctgatactgggctctggctggggagccatcagctttctgaagcacatcgacaccaagaagtacaacgtttccatcatcagccctagaagctatttcctgttcacgcccctgctgcccagcgcacctgtggggacagtagacgaaaagtccattatcgagcccatcgtgaatttcgccctcaagaaaaaggggaacgtcacctactatgaggcagaggccaccagcatcaatcccgaccggaacaccgttaccatcaagtcactgagcgccgtttcccagctataccagcctgagaaccacctgggcctgcaccaggccgaacccgccgaaattaagtacgactatttaatcagcgccgtgggtgccgaacccaacacatttggaatccccggcgtgactgactacggccatttcctgaaggagattcccaacagcctggaaatcagacggactttcgccgccaatctagaaaaggctaacctgttgcctaagggcgaccccgaacggagaagactgctgagcatcgtggtggttggcggtgggcccacaggcgtggaggccgctggcgagctgcaggactatgttcaccaggacctgcggaagtttctccctgccctggccgaagaagtccagattcacctggtcgaagccctgcccatcgtgctgaacatgttcgagaagaagctgagctcatacgcccagtcacatctggaaaacacctccatcaaggtgcatctgagaacggctgtcgccaaagtggaagaaaagcagctgttggcaaagaccaaacacgaagacggcaaaattaccgaggaaactatcccatacggtaccctgatttgggccaccggtaacaaggcaagaccggtgatcaccgacctgttcaagaaaattcccgagcaaaacagcagcaagagaggattggcagtgaatgacttcttgcaggtgaaaggcagcaacaacattttcgccatcggtgacaacgcctttgccgggctgccacctacagcccaggtggcgcaccaggaagccgagtacttggccaagaatttcgataagatggctcaaatacccaatttccaaaagaacctgtcctcccggaaggataaaatcgatctgttgttcgaggaaaacaacttcaagcctttcaaatacaacgatttaggtgccctggcctacctgggctccgaaagggccattgccaccataagaagcggcaagagaaccttctacaccggtggaggcctgatgaccttctacctgtggagaatcctgtacctgtccatgatcctgagcgccagaagcagactgaaggtgtttttcgactggatcaagctggcattcttcaaaagggacttttttaagggactgtga

SEQ ID NO: 23 - DNA, 1542 bp, Artificial Sequence
  source: /note="Description of Artificial Sequence: Synthetic polynucleotide"
atgctatcgaagaatctgtacagtaacaagcggctgctgaccagcaccaataccctcgtgcgcttcgcttccaccagatccaccggcgtcgaaaacagcggggctggccccaccagctttaagaccatgaaagtcatcgacccccagcacagcgacaagccaaacgtgctgatcctgggctcggggtggggagccatcagctttttaaagcacatcgacaccaagaagtacaacgtcagcatcatctctcctagaagctacttcctgtttacccctctgctgcccagcgcacctgtgggaacagtagacgagaagtccatcatcgagcccatcgttaactttgctctcaagaaaaagggcaacgtcacctactatgaggccgaggccacctctatcaatcccgacaggaacaccgttaccatcaaaagcctgagcgccgtgagccagctataccagcctgaaaaccacctggggctgcaccaggcagaacctgctgaaattaagtacgactatctgatcagcgccgtgggtgccgagcccaacacctttggtattcccggggtcactgattacggccatttcctgaaagagattcccaactctttggaaatcagacggactttcgccgccaatctggaaaaggccaacctgttgccaaagggtgatcccgagcggagaaggctgctgagcattgtcgtcgttggtggtggccctacaggcgtggaggctgctggcgagctacaggactacgtgcaccaggacctgagaaagtttctgcccgccctggccgaggaagtgcaaattcacctggtcgaagctctgcccatcgttctgaatatgttcgagaaaaagctgagcagctacgcgcagagccacttagaaaacacctccatcaaagtgcacctgagaaccgctgtggccaaagtggaagagaagcagttgttggcaaagaccaagcacgaggacggtaagataaccgaggaaaccatcccatacggcactctgatttgggccaccggtaacaaggcaagacccgtgatcaccgacctgttcaagaagatccccgagcagaacagctccaagcggggactggcagtgaacgactttctgcaggtcaaaggcagcaacaacatcttcgccatcggcgacaacgcctttgctggcttgcctccaacagcccaggtggcccaccaggaggccgaatacctggccaagaatttcgataagatggcccaaatccccaatttccagaagaatctgtcctcacggaaggataaaatcgatctcctgttcgaggaaaacaactttaagcccttcaaatacaacgacctgggcgccttagcatacctgggctccgaaagggccattgccaccatccgttccggtaagcggacattctacaccggcggtggcctgatgaccttctacctgtggagaatcttgtacctgagcatgatcctaagcgcccgcagcagattaaaggtgtttttcgactggatcaaattagcattcttcaagagggactttttcaaaggcttatga

SEQ ID NO: 24 - DNA, 1542 bp, Artificial Sequence
  source: /note="Description of Artificial Sequence: Synthetic polynucleotide"
atgctgagcaagaatctgtatagtaacaagcggctgctcaccagcacgaacacgctagtgcgcttcgctagcaccagatccaccggcgtcgaaaacagcggagctggtcctaccagctttaagaccatgaaggtcatcgaccctcagcacagcgacaaaccaaacgtgctgatcctgggttctggctggggcgccatcagctttttaaagcacattgacaccaagaagtacaacgttagcatcatcagccccagaagctatttcctgtttacccccctgttacctagcgcccctgttgggaccgtagacgagaagtcaatcatcgagcccatcgttaatttcgctctgaagaaaaaggggaacgttacctactacgaggccgaggccacctctatcaaccccgaccggaacaccgtgaccatcaagagcttaagcgccgttagccagctgtaccagcccgaaaaccatctaggcctgcaccaggccgagcccgccgaaattaagtacgattacttaatcagtgccgtgggtgcggagcctaacacctttggaatccccggggtgactgattacggccacttcctgaaggagattcccaactctttggaaatccggcggaccttcgccgccaatctggaaaaggccaacctgctgcctaagggcgatcccgagagaagaagactactgagcatcgtcgtcgttggtggaggccccactggtgtagaggccgctggcgagctgcaggactacgtgcaccaggacctgcggaagtttctccccgcactggccgaagaagtgcagattcacctggtggaagccctgcccatcgtgctgaacatgttcgagaagaagcttagctcatacgcccaatcacacctggaaaacacctccatcaaagtgcatctgagaaccgccgtggccaaagtggaagaaaagcaattgctggcaaagaccaaacacgaggacggcaaaattaccgaagaaaccatcccctacggcaccctgatttgggccaccggtaacaaggcaagacccgtaatcaccgacctgttcaagaaaattcccgagcaaaactcgagcaagcggggactggccgtgaatgactttctgcaggtgaaaggcagcaacaacattttcgccatcggcgacaacgcatttgccggcttgcctccaacagcccaagtggcccaccaagaagccgagtacctggccaagaacttcgacaaaatggcccaaatacccaatttccaaaagaacctgtcttcacggaaggataagattgatctcctgttcgaggaaaacaacttcaagcccttcaagtacaacgacctgggcgccctggcatacctgggcagcgaaagagccattgcaaccatccgtagcggcaagagaaccttttacaccggcggaggcctgatgaccttctacttatggcggattctgtacctgagcatgatcctaagcgccagatcgagattaaaggtcttcttcgactggattaagttagcattcttcaagagagacttcttcaaaggattatga

SEQ ID NO: 25 - DNA, 1542 bp, Artificial Sequence
  source: /note="Description of Artificial Sequence: Synthetic polynucleotide"
atgctgagcaagaacttgtacagcaacaagaggttgctcaccagcacgaacaccctcgtccgcttcgccagcaccagatccaccggcgtggaaaacagcggagctggccccacctcttttaagaccatgaaggtcattgacccccagcacagcgacaagccaaacgtgctgatactgggctcgggctggggcgccatctcgtttctgaagcacattgacaccaagaagtacaacgtttccatcatcagccccagaagctacttcttatttacccccctgctgcccagcgcaccagtgggaacagtggacgaaaagtcaatcattgagcccatcgtgaactttgccctgaagaaaaaggggaacgttacctactacgaggcagaggccaccagcatcaatcccgaccggaataccgtgaccatcaagagcttatctgccgttagccagctataccagcccgaaaaccacctggggctgcaccaggccgagcctgccgagattaagtacgactacctgatcagtgccgtgggcgcggagcccaacacctttggtattcctggcgtgactgactacggccacttcctgaaagagatccccaacagcctggaaataagacggacctttgccgccaatctggaaaaggctaacttactgcctaagggcgatcccgagcggagaagactgctgagcatcgtggtggtgggtggaggccctacaggtgtggaagctgctggcgagctgcaggactatgttcaccaggacctgcggaagttcctccccgccttggccgaggaagtgcaaattcacctggtggaagccctgcccatcgttctgaatatgtttgagaaaaagctgagctcatacgcccaatcacacttagaaaacacctccatcaaagtgcacctgagaaccgccgtcgccaaggtggaagagaagcagctgctggccaagaccaaacacgaggacggcaagattaccgaggaaactattccctacggtaccttgatttgggccacgggtaacaaggcaagaccggtgatcactgacctgttcaagaagattcccgagcagaacagctccaagagaggcttggcagtgaatgacttcctgcaggtcaaaggcagcaacaacattttcgccatcggtgacaacgcctttgccgggctgccacctacagcccaagtggcgcaccaagaagccgagtatttggccaagaatttcgacaaaatggcccagatacccaatttccaaaagaacctatcctccagaaaggataagatcgatctgctgttcgaggagaacaacttcaagcccttcaaatacaacgacttaggtgccttagcctacctgggctccgaaagggccattgccaccatcagaagcggtaagcggacattctacaccggcggtggcctgatgaccttctacttatggcggattctgtacctgtccatgatcctgtctgccagaagcagactgaaggtctttttcgactggatcaagttagcatttttcaagagagacttcttcaaaggactgtag

SEQ ID NO: 26 - DNA, 1542 bp, Artificial Sequence
  source: /note="Description of Artificial Sequence: Synthetic polynucleotide"
atgctgtcgaagaacttgtatagcaacaagcggctgctcaccagcacgaacacgctagtgagattcgccagcaccagatccaccggcgtggaaaactccggagctggccccacaagctttaagaccatgaaggtcatcgacccccagcacagcgacaagcccaacgtgctgatactgggctctggctggggcgctatctcgtttttaaagcacattgacaccaagaagtacaacgttagcatcatcagccccagaagctatttcttattcacccccctgctgccctctgcaccagttggaacagtggacgagaagtcaatcatcgagcccatcgtgaactttgccctgaagaaaaagggcaacgttacctactatgaggccgaagccacctctatcaaccccgacaggaataccgttaccataaagagcctgtctgccgtgtcccagctgtaccaacctgaaaaccacctagggctgcaccaggcagaacccgccgagattaagtacgactacttaatcagtgccgtaggcgcggagcccaacacctttggtatccctggcgtgactgactacggtcacttcctgaaggagattcccaactctctggaaatcagaagaactttcgccgccaacctagaaaaggccaacttattgcctaagggtgatcccgaacggagaaggctgctgagcatcgtggtcgtgggtggagggcccactggcgtggaagccgctggcgagctgcaggactatgtgcaccaggacctgagaaagtttctccctgcattggccgaggaagtgcaaattcacctggtggaagccctgcccatcgtgctgaacatgttcgagaagaagctgagcagctacgcccaaagccacttagaaaacacctccatcaaggtgcacctgagaaccgctgtggccaaggttgaagaaaagcagttgctggcaaagaccaagcacgaggacggtaaaattaccgaagaaaccatcccctacggtactttgatttgggccaccggcaacaaggcaagacccgtgatcaccgacctgttcaagaagatccccgagcaaaacagcagcaagcggggcttggccgtgaacgactttctgcaggtcaaaggcagcaacaacatcttcgccatcggtgacaacgcctttgccgggttgccacctaccgcccaggtggcgcaccaggaggccgagtatttggccaagaattttgataaaatggctcagatccccaatttccagaagaacctgtcctccagaaaggataagattgatctcctgttcgaggagaacaacttcaaacctttcaagtacaacgatctgggtgccctggcctacctgggcagcgaaagagccattgccaccatccgtagcggcaagagaacattctacaccggcggaggcctgatgaccttctacttatggcggattctgtacctgagcatgatcctgtctgccagaagcagactgaaggtgttcttcgactggatcaagttagcatttttcaaaagggacttctttaagggcctgtag

SEQ ID NO: 27 - DNA, 1542 bp, Artificial Sequence
  source: /note="Description of Artificial Sequence: Synthetic polynucleotide"
atgctgagcaagaacttgtacagcaacaagcggttgctgaccagcaccaataccctcgtccgcttcgctagcaccagatccaccggcgtggaaaacagcggagcaggtcccacaagctttaagaccatgaaggtcattgacccccagcacagcgacaaacccaacgtgctgatcctgggttcgggctggggcgccatcagctttctgaagcacattgacaccaagaagtacaacgtcagcatcatctctcccagaagctacttcctgtttacgcccttgctgcctagcgcccctgttggaaccgtagacgaaaagtccattattgagcccatcgttaacttcgccctgaagaaaaagggcaacgttacctactatgaggcagaagccaccagcatcaaccccgacaggaacaccgttaccatcaaatcactgtctgccgtgagccagctgtaccagcctgagaaccacctagggctgcaccaggccgagcctgccgagattaagtacgactatctgatcagcgctgtaggtgccgagcctaacacatttggaatccccggggtgactgattacggccatttcctgaaagagatccccaacagcctggaaatccggcggacttttgccgccaacctggaaaaggccaacctgttgcctaagggtgatcccgagcggagaaggctgctgagcatcgtggtcgttggcggtgggcctacaggtgtagaagctgctggtgagctgcaggattatgtgcaccaggacctgcggaagttcctccctgcactggccgaagaagtgcaaattcacttggtggaagctctgcccatcgtgctgaatatgttcgagaagaagctgtcaagctacgcgcaatcacatctggaaaacacctcgatcaaagtgcacctgagaaccgccgtggccaaagttgaagagaagcaactgctggccaagaccaagcacgaagacggcaaaattaccgaggaaaccattccctacggtaccctgatttgggccacgggcaacaaggcaagacccgtgatcaccgacctgttcaagaaaatccccgagcaaaacagcagcaagcggggcctggccgtgaacgactttctgcaggtcaaaggcagcaacaacatcttcgccattggcgacaatgcctttgctggcttgcctccaacagcccaggtggcgcaccaggaagccgagtatctggccaagaacttcgacaaaatggcccaaatacccaatttccaaaagaatctgtcctcacggaaggataaaattgacctgttgttcgaggagaacaacttcaaacccttcaagtacaacgatctgggcgccttagcatacctgggctccgaaagagccattgcaaccatcagaagcggcaagcggacattttacaccggtggaggcctgatgaccttctacctgtggagaatcctgtacttgagcatgattctaagcgccagaagcagattaaaggtgttcttcgactggatcaaactggcctttttcaagagagacttctttaagggcctgtag

SEQ ID NO: 28 - DNA, 1542 bp, Artificial Sequence
  source: /note="Description of Artificial Sequence: Synthetic polynucleotide"
atgctgagcaagaatttgtacagcaacaagaggctgctcaccagcaccaatacgctagtccgcttcgctagcaccagatccacaggggtcgaaaacagcggggcaggccctacaagctttaagaccatgaaggtcatcgacccccagcacagcgacaaaccaaacgtgctgatcctgggctctggctggggcgctatcagctttttaaagcacatcgacaccaagaagtacaacgtcagcatcatctctcccagaagctatttcttatttacccctctgttacctagcgcccctgttggaaccgtggacgagaagtcaatcatcgagcccatcgttaacttcgccctgaagaaaaagggcaacgtcacctactacgaggccgaagccaccagcatcaatcccgacaggaataccgtgaccatcaagagcctgagcgccgttagccagctataccaacccgaaaaccacctgggcctgcaccaagccgaacccgccgagattaagtacgattatctgatcagcgccgtaggcgcggagcccaacacatttggtatccccggcgtcaccgactacggccacttcctgaaggaaattcccaacagcttggaaataagacggacctttgccgccaatctagagaaggctaacctgctgccaaagggcgatcccgagagaagaaggctgctgagcatcgtcgtcgttggtggagggcctacaggcgtagaagctgctggcgaactacaggattacgtgcaccaggacctgagaaagtttctccctgccttggccgaggaagtccagattcacttggtggaagccctgcccatcgtgctgaatatgtttgagaagaagctgtcaagctacgcccaatcacatctggaaaacacctccatcaaagtgcatctgagaacggctgtggccaaagtggaagaaaagcagctgttggccaagaccaagcacgaggacggcaagataaccgaggaaaccattccctacggcaccttgatttgggccacgggtaacaaggcaagacccgtgatcaccgaccttttcaagaaaatccctgagcagaactcgtccaagagaggactggcagtgaacgacttcctgcaggtcaaaggcagcaacaacattttcgccatcggtgacaacgcctttgctggcctgcctcctacagcccaagtagcccaccaggaggccgagtatttggccaagaacttcgacaagatggcccaaatacccaatttccagaagaacctatcctcacggaaggataaaatcgacctgctgttcgaggaaaacaacttcaagcctttcaagtacaacgacctgggcgccttagcctacctgggcagcgaaagagccattgcaaccataagaagcggtaagcggaccttctacaccggcggaggcctgatgaccttctacctgtggcggatcttgtacttgagcatgatcctgtctgcccgcagcagactgaaggtgttcttcgactggattaagttagccttcttcaagagagacttctttaagggcctgtga

SEQ ID NO: 29 - DNA, 1542 bp, Artificial Sequence
  source: /note="Description of Artificial Sequence: Synthetic polynucleotide"
atgctaagcaagaacttgtacagcaacaagcggttgctgaccagcaccaacaccctcgtccgcttcgccagcaccagatccaccggcgtcgaaaacagcggagctggccccacatctttcaagaccatgaaggtcatcgacccccagcacagcgacaaaccaaacgtgctgatcctgggttctgggtggggagctatctcgtttttaaagcacatcgacaccaagaagtacaacgtcagcatcatcagccctagaagctacttcctgttcacgcctctgttacccagcgcaccagtggggaccgtagacgaaaagtccatcatcgagcccatcgtgaacttcgctctgaagaaaaagggcaacgtcacctactacgaggccgaggccaccagcatcaaccccgaccggaacaccgttaccatcaaaagcctgtctgccgttagccagctgtaccagcctgagaaccacctggggctgcaccaggcagagcctgctgagattaagtacgactatctgatcagtgccgtaggtgcggaacctaacacatttggtattcctggcgtgactgattacggccatttcctgaaagagatccccaacagcctggaaatcagaagaaccttcgccgccaatctggaaaaggccaacctgttgcctaagggtgaccccgaaagaagaaggctgctgagcatcgtggtcgtgggtggaggccccacaggtgtagaagctgctggcgaactgcaggactacgtgcaccaggacctgcggaagttcctccccgcattggccgaggaagtccagattcacttggtcgaagctctgcccatcgttctgaacatgttcgagaagaagcttagctcatacgcgcaaagccatctggaaaacacttcgatcaaagtacacctgagaaccgctgtcgccaaagttgaagagaagcagctgctggccaagaccaagcacgaggacggtaagataaccgaggaaactattccctacggtaccctgatttgggccacgggcaacaaggccagacccgtaatcaccgacctgttcaagaagattcccgagcaaaacagctccaagagaggcctggccgtgaacgacttcctgcaggtgaaaggcagcaacaacattttcgccattggcgacaacgcctttgccgggttgcctccaacagcccaggtggcgcaccaggaagccgagtatctggccaagaacttcgacaaaatggctcagatccccaatttccaaaagaacctatcttcacggaaggataagattgacctgctgttcgaggaaaacaactttaaacccttcaagtacaacgacttaggtgccttagcatacctgggcagcgaaagggccattgccaccataagatccggtaagcggaccttctacaccggcggaggcttaatgaccttctacctgtggcggatcctgtacttgtccatgatcctgagcgcccgcagcagattaaaggtcttcttcgactggattaaactggcctttttcaaaagagacttttttaagggcctgtga

SEQ ID NO: 30 - DNA, 1542 bp, Artificial Sequence
  source: /note="Description of Artificial Sequence: Synthetic polynucleotide"
atgctgagcaagaacttgtatagtaacaagcggctgctcaccagcaccaacaccctagtgcgcttcgccagcaccagatccaccggggtcgaaaactccggagcaggccccacaagcttcaagaccatgaaagtcattgacccccagcacagcgacaagccaaacgtgctgatcctgggctcggggtggggagccatctcgtttctgaagcacattgacaccaagaagtacaacgtctccatcatctctcccagaagctacttcctgttcacgcccttgttaccttctgcccctgtgggaacagtggacgagaagtcaatcatcgagcccatcgtgaactttgccctgaagaaaaagggcaacgtcacctactacgaggccgaagccacctctatcaatcccgacaggaacaccgtgaccatcaaatcactgagcgccgtgagccagctgtaccagcccgagaaccatctgggcctgcaccaagcagagcctgctgaaattaagtacgattatctgatcagcgccgtgggtgcggagcctaacacatttggtatccccggcgtgaccgactacggtcacttcctgaaagagatccccaacagcctggaaatcagacggaccttcgccgccaacctagaaaaggccaacctgttgcctaagggtgatcccgagagaagaaggctactgagcattgtcgtcgttggcggtgggcccacaggcgtggaggctgctggcgagctacaggactatgttcaccaggacctgcggaagttcctgcctgccctggccgaagaagtgcagattcacctggtcgaagccctgcccatcgtgttgaacatgttcgagaagaagcttagcagctacgcccaatcacatctggaaaacacctccatcaaagtgcacctgagaacggccgtggccaaggttgaagaaaagcaactgctggcaaagaccaagcacgaggacggcaagataaccgaagaaactatcccctacggcaccttgatttgggccacgggtaacaaggcaagaccggtaatcaccgacctgttcaagaaaatccccgagcagaacagcagcaagagaggcttggccgtgaacgacttcctgcaggtcaaaggcagcaacaacatcttcgccattggcgacaacgcatttgccggcttgccaccaacagcccaggtggcgcaccaggaagccgagtatctggccaagaacttcgacaaaatggcccaaatcccaaatttccaaaagaacctgtcttcacggaaggataagatcgatctcttgttcgaggaaaacaactttaaacccttcaagtacaacgatctgggcgccttagcatacctgggcagcgaaagagccattgccaccatccgtagcggcaagcggaccttctacaccggtggaggcctgatgaccttctacctgtggagaattttgtacctgtccatgattctaagcgcacgctcgagattaaaggtgtttttcgactggatcaaactggcattcttcaagagagacttctttaagggcctgtag

SEQ ID NO: 31 - DNA, 1542 bp, Artificial Sequence
  source: /note="Description of Artificial Sequence: Synthetic polynucleotide"
atgctgagcaagaacctgtacagtaacaagaggttgctgaccagcaccaatacgctagtgcgcttcgccagcaccagatccacaggcgtggaaaactccggagctggccccacaagcttcaagaccatgaaggtcattgacccccagcacagcgacaagcccaacgtgctgatcctgggctcggggtggggagccatctcgtttctgaagcacatcgacaccaagaagtacaacgtctccatcatctctcccagaagctacttcttatttacccccctgctgcccagcgcacctgttgggacagtggacgaaaagtccatcatcgagcccatcgtgaatttcgctctgaagaaaaagggcaacgtcacctactacgaggccgaggccacctctatcaaccccgacaggaataccgttaccatcaagagcttatctgccgtgagccagctgtaccaacccgaaaaccacctgggcctgcatcaagcagagcccgccgagattaagtacgactacctgatcagcgccgtaggtgccgaacccaacacctttggaattcccggggtcactgattacggccacttcctgaaagaaatccccaactctctggaaatacggcggacctttgccgccaatctagaaaaggccaacttactgcctaagggcgaccccgaacggagaaggctgctgtccatcgtcgtggttggtggagggcctacaggcgtggaagctgctggtgagctacaggattacgttcaccaggacctgcggaagttcctgcctgccttggccgaagaagtccagattcacctggtcgaagctctgcccatcgtgctgaacatgttcgagaaaaagctgagcagctacgcccagtcacacttagaaaacacttcgatcaaagtgcacctgagaacggccgtcgccaaagtggaagagaagcagctgttggccaagaccaaacacgaggacggcaaaattaccgaagaaaccattccatacggtactctgatttgggccaccggcaacaaggccagaccggtgatcaccgacctgttcaagaagattcccgagcagaactcgtccaagcggggcctggcagtgaacgacttcttgcaggtcaaaggcagcaacaacatcttcgccattggtgacaacgcctttgctggcctgcctcctaccgcccaggtggcccaccaggaagccgaatatctggccaagaattttgataagatggcccagatacccaatttccaaaagaacctatcctccagaaaggataagatcgacctgttgttcgaggagaacaactttaagcccttcaagtacaacgatctgggcgccttagcatacctgggcagcgaaagagccattgccaccatcagatccggcaagcggacattctacaccggtggtggcctgatgaccttctacctgtggcggatcttgtacctgtccatgatcctatctgcaagaagcagactgaaggtgttcttcgactggattaagttagccttcttcaaaagggacttcttcaaaggactgtga

SEQ ID NO: 32 - DNA, 1542 bp, Artificial Sequence
  source: /note="Description of Artificial Sequence: Synthetic polynucleotide"
atgctaagcaagaatttgtacagtaacaagaggctgctcaccagcaccaatacgctcgtgagattcgccagcaccagatccacaggggtcgaaaacagcggggctggccctaccagctttaagaccatgaaggtcattgacccccagcacagcgacaaacccaacgtgctgatcctgggttcgggctggggagccatcagctttttaaagcacattgacaccaagaagtacaacgtttccatcatcagccctagaagctatttcctgttcacgcccttgttacccagcgcacctgtggggaccgtagacgaaaagtccatcattgagcccatcgttaacttcgccctgaagaaaaagggcaacgtcacctactacgaggccgaggccaccagcatcaaccccgaccggaacaccgttaccatcaaaagcctgtctgccgtgtcccagctataccagcccgaaaaccatctgggcctgcaccaggcagaacccgctgaaattaagtacgactatctgatcagcgccgtaggtgccgagcccaacacctttggaatccctggcgtgactgactacggtcacttcctgaaagaaattcccaacagcttggaaataagaagaacctttgccgccaatctggagaaggccaacttattgcctaagggcgatcccgagagaagaaggctgctgagcattgtggtcgttggcggaggccccacaggtgtggaggctgctggcgaactgcaggactatgttcaccaggacctgcggaagtttctgcccgcattggccgaggaagtccagattcacttggtggaagctctgcccatcgtgttgaatatgttcgagaagaagcttagctcatacgcccaaagccacctggaaaacacctcgatcaaagtgcacctgagaaccgccgtggccaaggtggaagagaagcaactgctggccaagaccaagcacgaggacggtaaaataaccgaggaaactatcccctacggcactttgatttgggccacgggcaacaaggccagaccggtgatcaccgaccttttcaagaagatccccgagcagaactcgtccaagcggggactggccgtgaatgactttctgcaggtcaaaggcagcaacaacattttcgccatcggcgacaacgcctttgccggcctgcctcctacagcccaagtagcgcaccaggaagccgagtacctggccaagaacttcgacaaaatggcccagatccccaatttccaaaagaacctgtcttccagaaaggataagattgatctcctgttcgaggagaacaacttcaagcccttcaagtacaacgatctgggtgccctggcctacctgggaagcgaaagagccattgcaaccatccgtagcggtaagcggaccttttacaccggcggtggcctgatgaccttctacttatggagaatcctgtacctgagcatgattctaagcgccagatcgagactgaaggtgttcttcgactggattaagttagcctttttcaaaagggacttctttaagggcctgtag

SEQ ID NO: 33 - DNA, 1542 bp, Artificial Sequence
  source: /note="Description of Artificial Sequence: Synthetic polynucleotide"
atgctgagcaagaatctgtacagcaacaagaggttgctgacctcgaccaacaccctcgtccgcttcgcctccaccagatccacaggggtcgaaaacagcggagctggccccaccagctttaagaccatgaaggtcatcgacccccagcacagcgacaaacccaacgtgctgatcctgggttctggctggggagctatctcgtttttaaagcacatcgacaccaagaagtacaacgtcagcatcatctctcccagaagctacttcttattcacccctctgttacccagcgcacctgtgggaacagtagacgaaaagtccatcatcgagcccatcgtgaacttcgctctgaagaaaaaggggaacgtcacctactacgaggcagaggccaccagcatcaaccccgacaggaacaccgttaccatcaaaagcctgagcgccgtgtcccagctataccagcctgagaaccacctaggcctgcaccaggcagaacccgccgagattaagtacgattatctgatcagcgccgtgggcgccgagcctaacacatttggtattcctggggtcaccgactacggtcacttcctgaaggaaattcccaactctctggaaatcagacggactttcgccgccaacctagagaaggccaacttactgcctaagggtgaccccgagagaagaagactgctgtccattgtggtcgttggcggtggccccactggtgtggaagctgctggtgagctgcaggactacgtgcaccaggacctgcggaagttcctccctgccttggccgaagaagtccaaattcacctggtggaagccctgcccatcgtgctgaacatgttcgagaagaagctgtcaagctacgcgcagagccacttagaaaacacttccatcaaagtacacctgagaacggccgtggccaaggttgaagagaagcaactgctggccaagaccaagcacgaggacggcaagattaccgaggaaactatcccatacggtactctgatttgggccaccggtaacaaggcaagacccgtaatcactgaccttttcaagaagatccccgagcagaacagctccaagcggggcttggccgtgaacgacttcttgcaggtcaaaggcagcaacaacattttcgccatcggtgacaacgcatttgccggcttgccacctaccgcccaagtagcccaccaagaagccgaatatttggccaagaatttcgataagatggcccaaatacccaatttccagaagaacctgtcttcaagaaaggataaaatcgatctgctgttcgaggaaaacaacttcaagcctttcaagtacaacgacttaggcgccctggcatacctgggcagcgaaagagccattgccaccatcagatccggcaagagaaccttttacaccggcggaggcttaatgaccttctacttatggcggattttgtacctgagcatgattctgagcgcaagaagcagattaaaggtgttcttcgactggatcaagctggccttcttcaagagagacttcttcaaaggcctgtag

SEQ ID NO: 34 - DNA, 1542 bp, Artificial Sequence
  source: /note="Description of Artificial Sequence: Synthetic polynucleotide"
atgctatcgaagaacctgtacagtaacaagcggctgctgacctcgaccaacacgctagtgagattcgctagcaccagatccacaggcgtggaaaacagcggggctggccccaccagcttcaagaccatgaaggtcattgacccccagcacagcgacaagccaaacgtgctgatcctgggctctggctggggcgccatttcgtttctgaagcacatcgacaccaagaagtacaacgtttccatcatcagccccagaagctatttcttatttacgcccctgttacccagcgcaccagttggaacagtggacgagaagtcaatcattgagcccatcgtgaatttcgccctgaagaaaaaggggaacgttacctactacgaggcagaagccaccagcatcaaccccgaccggaataccgttaccatcaagagcctgtctgccgtttcccagctataccagcccgagaaccacctgggcctgcatcaggcagagcccgccgagattaagtacgactacctgatcagcgccgtaggcgcggaacctaacacctttggaatccccggggtcactgattacggccacttcctgaaagaaattcccaactctctggaaatccggagaacttttgccgccaacctggagaaggctaacctgctgcctaagggtgaccccgaaagaagaagactgctgagcatcgtcgtggtgggtggaggccctactggtgtagaggccgctggcgagctgcaggattatgtgcaccaggacctgagaaagtttctccccgccctggccgaggaagtccagattcacctggtggaagccctgcccatcgttttgaatatgttcgagaagaagcttagcagctacgcgcaaagccacctggaaaacacttccatcaaggtacacctgagaaccgccgtcgccaaggtggaagagaagcagttgctggccaagaccaagcacgaggacggcaagattaccgaggaaactatcccctacggtactctgatttgggccaccggcaacaaggcaagacccgtgatcactgacctgttcaagaagatccctgagcaaaacagcagcaagcggggattggcagtgaacgactttttgcaggtgaaaggcagcaacaacattttcgccatcggcgacaacgcctttgccggcttgccaccaaccgcccaggtagcgcaccaggaagccgagtatctggccaagaattttgacaagatggcccagatcccaaatttccaaaagaacctgtcctcccggaaggataagatcgacctgctgttcgaggaaaacaacttcaaacctttcaaatacaacgacttaggcgccctggcatacctgggctccgaaagagccattgccaccatccgtagcggcaagcggaccttttacaccggcggtggcctgatgaccttctacctgtggcggattctgtacttgagcatgatcctgagcgcccgctcgagattaaaggtgtttttcgactggattaagttagccttcttcaagagggacttttttaaaggcctgtag

SEQ ID NO: 35 - DNA, 1542 bp, Artificial Sequence
  source: /note="Description of Artificial Sequence: Synthetic polynucleotide"
atgctaagcaagaatttgtacagcaacaagcggctgctgaccagcaccaacacgctagtccgcttcgcctccaccagatccacaggcgtggaaaactccggggcaggtcccaccagcttcaagaccatgaaggtcatcgacccccagcacagcgacaagcccaacgtgctgatcctgggctcggggtggggcgctatctcgtttttaaagcacattgacaccaagaagtacaacgtctccatcatcagccccagaagctacttcctgttcacccctttgctgccttctgccccagtgggaacagtagacgaaaagtccatcatcgagcccatcgtgaatttcgccctgaagaaaaaggggaacgtcacctactatgaggccgaggccacctctatcaatcccgaccggaacaccgttaccatcaagagcttaagcgccgtgagccagctataccagcccgagaaccacctagggctgcaccaagccgaacccgctgaaattaagtacgactatttaatcagcgctgtgggcgcggaacccaacacatttggtatccccggggtcaccgattacggccatttcctgaaggagatccccaactctttggaaatccggcggactttcgccgccaacctggagaaggctaacctgctgccaaagggcgaccccgaacggagaaggctgctgagcatcgtggtggttggcggagggcccactggcgtggaagctgctggcgagctgcaggattatgtgcaccaggacctgcggaagttcctccctgcattggccgaggaagtccaaattcacctggtggaagccctgcccatcgtgttgaacatgttcgagaaaaagctttcaagctacgcccagagccacttagaaaacacttccatcaaagtacacctgagaaccgccgtggccaaagtggaagagaagcaactgttggcaaagaccaagcacgaggacggcaagataaccgaagaaaccattccatacggcactttgatttgggccaccggcaacaaggccagacccgtgatcaccgacctgttcaagaaaatccctgagcagaacagcagcaagcggggcttggccgtgaatgacttcctgcaggtgaaaggcagcaacaacatcttcgccatcggcgacaacgcctttgccggcttgccaccaacagcccaagtagcccaccaggaagccgaatacctggccaagaacttcgataaaatggcccaaatacccaatttccaaaagaacctgtcttcccggaaggataagattgatctgttgttcgaggaaaacaacttcaaacccttcaaatacaacgacttaggtgccctggcctacctgggctccgaaagagccattgccaccatcagaagcggcaagagaaccttttacaccggcggaggcttaatgaccttctacctgtggcggattctgtacctgagcatgatcctgtctgcaagaagcagattaaaggtcttcttcgactggatcaagctggcattcttcaaaagggacttctttaagggcctgtag

SEQ ID NO: 36 - DNA, 1542 bp, Artificial Sequence
  source: /note="Description of Artificial Sequence: Synthetic polynucleotide"
atgctatcgaagaacctgtatagcaacaagcggctgctcaccagcacgaataccctagtgagattcgcctccaccagatccaccggcgtggaaaacagcggggctggtcctaccagcttcaagaccatgaaagtcattgacccccagcacagcgacaaacccaacgtgctgatcctgggctctggctggggcgccatctcgtttttaaagcacattgacaccaagaagtacaacgtcagcatcatctctcccagaagctacttcctgttcacgcccctgctgccctctgccccagtgggaacagtagacgagaagtccatcatcgagcccatcgtgaattttgccctgaagaaaaaggggaacgtcacctactatgaggccgaggccaccagcatcaaccccgacaggaataccgtgaccatcaaatcattaagcgccgtgagccagctgtaccagcccgagaaccacctgggcctgcaccaggccgagcccgccgaaattaagtacgattatctgatcagtgccgtaggtgcggaacccaacacctttggaattcctggcgtgaccgactacggccacttcctgaaggaaatccccaacagcctggaaataagaagaaccttcgccgccaacctagagaaggccaacttattgccaaagggcgatcccgagcggagaaggctactgagcatcgtggtggtgggcggagggcccacaggtgtagaggccgctggcgagctgcaggactacgtgcaccaggacctgagaaagttcctccccgcattggccgaggaagtccaaattcacctggtcgaagctctgcccatcgtgttgaacatgttcgagaagaagctgtcaagctacgcgcagagccacctggaaaacacttcgatcaaggtacacctgagaacggccgtcgccaaggtggaagagaagcagctgctggcaaagaccaaacacgaggacggcaagattaccgaggaaaccattccctacggcactctgatttgggccacgggcaacaaggccagacccgtgatcaccgaccttttcaagaaaattcccgagcaaaactcgtccaagagaggactggcagtgaatgacttcttgcaggtcaaaggcagcaacaacatcttcgccatcggcgacaatgcatttgccgggctgcctcctacagcccaggtagcccaccaggaagccgaatacttggccaagaactttgataaaatggctcaaatcccaaatttccaaaagaacctatcctcacggaaggataagattgacctcctgttcgaggaaaacaacttcaaacccttcaagtacaacgacctgggcgccctggcatacctgggctccgaaagagccattgcaaccatccgttccggtaagcggacattttacaccggtggaggcttaatgaccttctacctgtggagaatcctgtacctgagcatgatcctgtctgcccgctcgagattaaaggtgttcttcgactggatcaagctggcattcttcaagagggacttttttaagggcctgtga

SEQ ID NO: 37 - DNA, 1542 bp, Artificial Sequence
  source: /note="Description of Artificial Sequence: Synthetic polynucleotide"
atgctgagcaagaatctgtacagcaacaagcggttgctgaccagcaccaatacgctcgtgcgcttcgctagcaccagatccaccggcgtcgaaaacagcggggctggtcctaccagcttcaagaccatgaaagtcattgaccctcagcacagcgacaagcccaacgtgctgatcctgggttcgggctggggagccattagctttctgaagcacatcgacaccaagaagtacaacgtttccatcatctctcccagaagctatttcctgttcacccccctgctgcctagcgcccctgtgggaaccgtggacgaaaagtccattatcgagcccatcgttaacttcgctctgaagaaaaagggcaacgttacctactatgaggcagaggccacctctatcaatcccgaccggaacaccgtgaccatcaagagcctgtctgccgtgagccagctgtaccaacccgaaaaccacctagggctgcaccaggccgagcccgctgagattaagtacgattacttaatcagcgccgtgggtgcggagcccaacacatttggaatccccggcgtgaccgattacggtcacttcctgaaggagatccccaactctctggaaatcagaagaacctttgccgccaacctagaaaaggccaacttactgcctaagggtgaccccgaacggagaagactgctgtccatcgtggtcgttggcggagggcctacaggcgtagaggccgctggcgaactgcaggattacgtgcaccaggacctgcggaagtttctccccgcactggccgaggaagtccagattcacctggtggaagccctgcccatcgttctgaacatgttcgagaagaagctgagcagctacgcgcaaagccacttagaaaacacttccatcaaagtacatctgagaaccgctgtggccaaggttgaagagaagcagctgttggccaagaccaagcacgaggacggcaagattaccgaggaaaccatcccatacggtaccctgatttgggccaccggcaacaaggccagacccgtaatcactgacctgttcaagaaaatccccgagcaaaactcgtccaagcggggattggccgtgaatgacttcctgcaggtcaaaggcagcaacaacatcttcgccatcggcgacaatgcctttgccggcttgcctcctaccgcccaagtagcgcaccaagaggccgaatatttggccaagaatttcgataaaatggcccaaataccaaatttccaaaagaatctatcttcacggaaggataagatcgatctcttgttcgaggagaacaacttcaagcccttcaagtacaacgatctgggcgccctggcatacctgggcagcgaaagagccattgcaaccatccgtagcggtaagcggacattctacaccggcggaggcctgatgaccttctacctgtggagaattttgtacttgtccatgatcctgtctgcacgcagcagactgaaggtgtttttcgactggatcaagctggccttcttcaaaagggacttcttcaagggactgtga

SEQ ID NO: 38 - DNA, 1542 bp, Artificial Sequence
  source: /note="Description of Artificial Sequence: Synthetic polynucleotide"
atgctgagcaagaatttgtacagtaacaagaggttgctcaccagcaccaataccctcgtccgcttcgccagcaccagatccacaggcgtcgaaaactccggagctggccctaccagcttcaagaccatgaaagtcattgaccctcagcacagcgacaaaccaaacgtgctgatcctgggttctggctggggcgccatcagctttctgaagcacattgacaccaagaagtacaacgttagcatcatcagccccagaagctatttcctgtttacgcctctgttacccagcgccccagttggaaccgtggacgagaagtccattatcgagcccatcgttaactttgccctcaagaaaaagggcaacgtcacctactacgaggccgaggccaccagcatcaatcccgaccggaataccgtgaccatcaaaagcctgagcgccgtgtcccagctataccaacccgaaaaccacctagggctgcaccaggccgagcctgccgagattaagtacgattacctgatcagcgctgtgggcgcggaacctaacacatttggaatccctggcgtgactgactacggccatttcctgaaagagattcccaactctttggaaatccggcggacttttgccgccaacctggagaaggccaacctgttgccaaagggcgaccccgagcggagaaggctgctgtccattgtggtggtgggcggaggccccactggcgtggaagccgctggcgagctacaggactatgtgcaccaggacctgcggaagttcctccctgccttggccgaggaagtccaaattcacctggtggaagccctgcccatcgttctgaacatgtttgagaagaagctttcaagctacgcccagtcacacttagaaaacacttccatcaaagtgcacctgagaaccgccgtcgccaaggtggaagagaagcagctgttggccaagaccaagcacgaggacggcaaaattaccgaagaaactattccatacggtaccttgatttgggccacgggtaacaaggcaagacccgtgatcactgaccttttcaagaagatccccgagcaaaacagctccaagagaggcctggccgtgaacgactttctgcaggtgaaaggcagcaacaacatcttcgccatcggcgacaatgcctttgctgggttgcctcctacagcccaagtagcccaccaggaagccgagtatttggccaagaacttcgataagatggcccaaatccccaatttccaaaagaatctgtcctcccggaaggataagattgacctcctgttcgaggaaaacaacttcaagcctttcaaatacaacgacttaggcgccctggcatacctgggaagcgaaagggccattgcaaccatccgtagcggcaagcggacattctacaccggcggtggcctgatgaccttctacttatggcggatcctgtacctgagcatgatcctgtctgcacgctcgagattaaaggtcttcttcgactggatcaagctggccttcttcaaaagggacttcttcaagggcttatag

SEQ ID NO: 39 - DNA, 1542 bp, Artificial Sequence
  source: /note="Description of Artificial Sequence: Synthetic polynucleotide"
atgctgtcgaagaatctgtacagcaacaagcggctgctgaccagcaccaacaccctcgtccgcttcgcctccaccagatccaccggcgtggaaaacagcggggctggccctaccagctttaagaccatgaaagtcattgacccccagcacagcgacaagccaaacgtgctgatactgggttctgggtggggagccatcagctttctgaagcacattgacaccaagaagtacaacgttagcatcatctctcccagaagctacttcttatttacccccttgctgccctctgcccctgtggggaccgtggacgagaagtccattatcgagcccatcgtgaatttcgctctgaagaaaaaggggaacgtcacctactatgaggcagaagccaccagcatcaaccccgacaggaacaccgtgaccataaagagcctgtctgccgtgtcccagctgtaccagcccgagaaccacctggggctgcatcaggcagaacccgccgaaattaagtacgactacttaatcagtgccgtgggcgccgaacccaacacctttggaatccctggggtcaccgactacggccatttcctgaaagagatccccaactctctggaaatcagaagaactttcgccgccaacctagaaaaggctaacttattgcctaagggtgatcccgaaagaagaagactgctgtccatcgtggtcgtgggcggagggcccacaggcgtggaagctgctggcgagctgcaggactatgtgcaccaggacctgcggaagttcctgcccgcattggccgaggaagtccaaattcacttggtcgaagctctgcccatcgttctgaacatgttcgagaaaaagctttcaagctacgcccagtcacacttagaaaacacttccatcaaagtgcacctgagaacggccgtggccaaagtggaagagaagcaattgttggccaagaccaaacacgaagacggcaaaattaccgaagaaaccatcccatacggcaccctgatttgggccaccggcaacaaggccagacccgtgatcactgacctgttcaagaagatccctgagcaaaactcgagcaagcggggactggccgtgaatgactttttgcaggtcaaaggcagcaacaacattttcgccattggcgacaacgcctttgccggcctgcctcctacagcccaggtagcccaccaggaggccgagtacttggccaagaacttcgataaaatggcccagatacccaatttccaaaagaatctgtcctcccggaaggataaaattgatctgttgttcgaggaaaacaacttcaagcctttcaagtacaacgatttaggcgccctggcatacctgggctccgaaagggccattgcaaccataagatccggtaagcggaccttctacaccggcggaggcctgatgaccttctacctgtggagaatcttgtacctgagcatgatcctgtctgcaagaagcagactgaaggtgttcttcgactggattaaactggccttcttcaaaagggacttctttaaaggcttatag

SEQ ID NO: 40 - DNA, 1542 bp, Artificial Sequence
  source: /note="Description of Artificial Sequence: Synthetic polynucleotide"
atgctatcgaagaacttgtacagtaacaagcggctgctgacctcgaccaacaccctcgtccgcttcgccagcaccagatccacaggggtggaaaacagcggagctggccctacatctttcaagaccatgaaagtcatcgacccccagcacagcgacaagccaaacgtgctgatactgggttctggctggggcgctatctcgtttctgaagcacatcgacaccaagaagtacaacgttagcatcatcagccccagaagctacttcctgttcacgcctttgctgcccagcgccccagtggggacagtggacgagaagtccattattgagcccatcgttaactttgctctcaagaaaaagggcaacgtcacctactacgaggccgaggccacctctatcaatcccgaccggaacaccgttaccatcaagtcactgtctgccgtttcccagctgtaccagcctgagaaccatctggggctgcaccaagccgaacctgccgaaattaagtacgactacctgatcagcgctgtgggtgccgagcccaacacatttggtatccccggggtgaccgactacggtcacttcctgaaggaaatccccaacagcctggaaatccggcggacctttgccgccaatctggaaaaggccaacctgctgcctaagggtgaccccgagcggagaagactgctgagcatcgtggtcgtgggcggtggccctacaggtgtagaagctgctggtgagctacaggactacgtgcaccaggacctgcggaagttcctccctgccttggccgaggaagtgcagattcacctggtggaagctctgcccatcgttctgaacatgttcgagaagaagctgtcaagctacgcccagagccacctggaaaacacctccatcaaagtgcacctgagaacggccgtggccaaggtggaagaaaagcagttgctggccaagaccaagcacgaagacggtaagattaccgaggaaactattccctacggtactttgatttgggccacgggcaacaaggccagaccggtaatcactgaccttttcaagaaaattcccgagcagaacagcagcaagcggggattggccgtgaatgactttctgcaggtgaaaggcagcaacaacattttcgccatcggtgacaacgcctttgctggcctgccaccaacagcccaggtagcgcaccaggaagccgaatacttggccaagaattttgacaaaatggcccagatacccaatttccagaagaacctatcctcccggaaggataaaatcgatctgctgttcgaggaaaacaacttcaagcccttcaaatacaacgacctgggtgccctggcctacctgggcagcgaaagagccattgccaccatccgttccggtaagcggacattttacaccggtggaggcctgatgaccttctacctgtggagaattttgtacttgtccatgattctgtctgcccgcagcagactgaaggtgtttttcgactggattaagttagcctttttcaagagggacttcttcaagggattatga

SEQ ID NO: 41 - DNA, 1542 bp, Artificial Sequence
  source: /note="Description of Artificial Sequence: Synthetic polynucleotide"
atgctgtcgaagaatttgtacagcaacaagaggttgctcacctcgaccaataccctcgtgcgcttcgccagcaccagatccaccggggtcgaaaactccggggctggtcctacctctttcaagaccatgaaagtcatcgacccccagcacagcgacaagccaaacgtgctgatcctgggctcggggtggggagctatcagctttctgaagcacattgacaccaagaagtacaacgtcagcatcatcagccccagaagctacttcctgttcacccccctgctgcctagcgccccagtggggacagtggacgagaagtcaattatcgagcccatcgtgaatttcgctctgaagaaaaagggcaacgttacctactacgaggcagaagccaccagcatcaatcccgacaggaacaccgttaccatcaagtcattatctgccgtttcccagctgtaccaacccgaaaaccacctgggcctgcaccaggccgagcccgccgagattaagtacgattacttaatcagcgccgtgggcgcggaacccaacacctttggtatccccggcgtcaccgactacggtcacttcctgaaagaaattcccaacagcctggaaatccggagaacttttgccgccaacctggaaaaggccaacttactgcctaagggcgatcccgagcggagaagactactgtccatcgtggtcgtgggcggaggccctacaggcgtagaagccgctggcgaactacaggactatgttcaccaggacctgcggaagtttctgcccgcattggccgaagaagtgcaaattcacttggtcgaagccctgcccatcgtgctgaacatgttcgagaagaagctgtcaagctacgcccagtcacacctggaaaacacttcgatcaaggtgcacctgagaacggccgtcgccaaggtggaagagaagcaactgttggcaaagaccaaacacgaagacggcaagataaccgaagaaaccattccctacggcaccctgatttgggccacgggtaacaaggccagaccggtgatcactgacctgttcaagaagatccccgagcagaactcgtccaagcggggcctggcagtgaacgactttctgcaggtgaaaggcagcaacaacattttcgccatcggtgacaacgcatttgccggcctgcctccaacagcccaagtggcgcaccaagaagccgaatacttggccaagaatttcgacaaaatggcccaaatcccaaatttccagaagaacctgtcctcccggaaggataagatcgatctgttgttcgaggaaaacaactttaaacccttcaaatacaacgatctgggcgccctggcctacctgggaagcgaaagggccattgccaccataagatccggtaagcggacattttacaccggcggaggcctgatgaccttctacctgtggcggatcctgtacctgagcatgatcctgagcgcacgcagcagattaaaggtgttcttcgactggattaaactggcctttttcaaaagggacttcttcaaaggcttatag

SEQ ID NO: 42 - DNA, 1542 bp, Artificial Sequence
  source: /note="Description of Artificial Sequence: Synthetic polynucleotide"
atgctgagcaagaacctgtacagcaacaagcggctgctgaccagcaccaacaccctagtgcgcttcgccagcaccagatccaccggcgtcgaaaactccggggctggccccaccagcttcaagaccatgaaggtcatcgaccctcagcacagcgacaagcccaacgtgctgatcctgggctctgggtggggcgctatcagctttctgaagcacatcgacaccaagaagtacaacgtctccatcatcagccccagaagctacttcctgttcacccccctgctgcccagcgcccctgtgggaaccgtggacgaaaagtcaatcatcgagcccatcgtgaatttcgccctgaagaaaaagggcaacgtcacctactacgaggccgaggccaccagcatcaaccccgaccggaacaccgtgaccatcaagagcctgagcgccgtgtcccagctgtaccaacccgagaaccatctgggcctgcaccaggccgagcccgccgagattaagtacgactacctgatcagtgccgtgggcgccgagcccaacacctttggaatccccggcgtgaccgactacggccacttcctgaaagagatccccaacagcctggaaatcagacggaccttcgccgccaacctggaaaaggctaacctgctgcctaagggcgaccccgagagaagaaggctactgagcatcgtggtcgtgggcggaggccccacaggcgtggaagctgctggcgagctacaggactacgtgcaccaggacctgcggaagttcctccccgccctggccgaggaagtgcagattcacctggtggaagctctgcccatcgtgctgaacatgttcgagaagaagcttagcagctacgcccagagccacttagaaaacacctccatcaaggtacacctgagaacggccgtggccaaggtggaagagaagcagctgctggccaagaccaagcacgaggacggcaagattaccgaggaaaccatcccctacggcaccctgatttgggccaccggcaacaaggccagacccgtgatcaccgacctgttcaagaagatccccgagcagaacagcagcaagcggggcctggccgtgaacgacttcctgcaggtcaaaggcagcaacaacatcttcgccatcggcgacaatgcctttgccggcctgcctcctacagcccaggtggcccaccaggaagccgagtacctggccaagaactttgacaagatggcccagatccccaatttccagaagaacctgtcctcccggaaggataagatcgacctgctgttcgaggaaaacaacttcaagcccttcaagtacaacgacctgggcgccctggcctacctgggcagcgaaagagccattgcaaccatcagaagcggcaagcggaccttctacaccggcggaggcctgatgaccttctacctgtggcggatcttgtacctgagcatgatcctgtctgcccgcagcagactgaaggtgttcttcgactggatcaagctggccttcttcaagagagacttcttcaagggcctgtga

SEQ ID NO: 43 - DNA, 1542 bp, Artificial Sequence
  source: /note="Description of Artificial Sequence: Synthetic polynucleotide"
atgctgagcaagaacctgtacagcaacaagcggctgctgaccagcaccaacaccctcgtgcgcttcgccagcaccagatccacaggcgtcgaaaacagcggggctggccccaccagctttaagaccatgaaggtcatcgacccccagcacagcgacaagcccaacgtgctgatcctgggctctggctggggcgccatcagctttctgaagcacatcgacaccaagaagtacaacgttagcatcatcagccccagaagctacttcctgttcacccccctgctgcccagcgcccctgtgggaaccgtggacgagaagtcaatcatcgagcccatcgtgaacttcgctctgaagaaaaagggcaacgtcacctactacgaggccgaggccaccagcatcaaccccgaccggaacaccgtgaccatcaagagcctgagcgccgtttcccagctgtaccaacccgagaaccacctgggcctgcaccaggccgaacccgccgagattaagtacgactacctgatcagcgccgtgggtgccgagcccaacacctttggaatccccggcgtcaccgactacggccacttcctgaaagagatccccaacagcctggaaatccggcggaccttcgccgccaacctagaaaaggccaacctgttgccaaagggcgaccccgagcggagaaggctgctgagcatcgtggtggtgggcggagggcccacaggcgtggaagctgctggcgaactgcaggactacgtgcaccaggacctgcggaagttcctccccgcactggccgaggaagtgcagattcacctggtggaagccctgcccatcgtgctgaacatgttcgagaagaagctgagctcatacgcccagagccacctggaaaacacctccatcaaggtgcacctgagaaccgccgtggccaaggtggaagagaagcagctgctggccaagaccaagcacgaggacggtaagattaccgaggaaaccatcccctacggcactctgatttgggccaccggcaacaaggccagacccgtgatcaccgacctgttcaagaagatccccgagcagaacagcagcaagcggggcttggccgtgaatgacttcctgcaggtcaaaggcagcaacaacatcttcgccatcggtgacaacgcctttgccggcctgcctcctacagcccaggtggcccaccaggaagccgagtacctggccaagaacttcgacaagatggcccagatccccaatttccagaagaacctgtcctcccggaaggataagatcgacctgttgttcgaggaaaacaacttcaagcccttcaagtacaacgacttaggtgccctggcctacctgggcagcgaaagggccattgccaccatcagaagcggcaagcggaccttctacaccggcggaggcctgatgaccttctacctgtggcggatcctgtacctgagcatgatcctgagcgcccgcagcagactgaaggtgttcttcgactggatcaagctggcctttttcaagagggacttcttcaagggcctgtga

SEQ ID NO: 44 - DNA, 1542 bp, Artificial Sequence
  source: /note="Description of Artificial Sequence: Synthetic polynucleotide"
atgctgagcaagaacctgtacagcaacaagcggctgctgacctcgaccaacaccctagtgcgcttcgccagcaccagatccaccggcgtcgaaaacagcggggctggccccaccagcttcaagaccatgaaggtcatcgacccccagcacagcgacaagcccaacgtgctgatcctgggctctggctggggcgccatcagctttctgaagcacatcgacaccaagaagtacaacgtcagcatcatcagccccagaagctacttcctgttcacccccctgctgcccagcgcccctgtgggaaccgtagacgagaagtccatcatcgagcccatcgtgaacttcgccctgaagaaaaagggcaacgtcacctactacgaggccgaggccaccagcatcaatcccgaccggaacaccgtgaccatcaagagcctgagcgccgtgtcccagctgtaccaacctgagaaccacctaggcctgcaccaggccgagcccgccgaaattaagtacgattacctgatcagcgccgtgggcgccgagcccaacacctttggaatccccggggtgaccgactacggccacttcctgaaagagatccccaactctctggaaatacggcggaccttcgccgccaacctggaaaaggctaacctgctgcctaagggcgaccccgagcggagaaggctgctgagcatcgtggtcgtgggcggaggccccacaggcgtggaagctgctggcgagctgcaggactacgtgcaccaggacctgcggaagttcctgcccgccctggccgaggaagtgcagattcacctggtcgaagccctgcccatcgtgctgaatatgttcgagaaaaagctgagcagctacgcccagagccacctggaaaacacctccatcaaggtacacctgagaaccgccgtggccaaggtggaagagaagcagctgctggccaagaccaagcacgaggacggcaagataaccgaggaaaccatcccctacggcaccctgatttgggccaccggcaacaaggccagacccgtgatcaccgacctgttcaagaaaatccccgagcagaacagctccaagcggggcctggccgtgaacgacttcctgcaggtcaaaggcagcaacaacatcttcgccatcggcgacaacgcatttgccgggttgcctcctacagcccaggtggcccaccaggaagccgagtacctggccaagaacttcgacaagatggcccagatccccaatttccagaagaacctgtcctcccggaaggataagatcgacctgctgttcgaggaaaacaacttcaagcccttcaaatacaacgatctgggcgccctggcctacctgggcagcgaaagagccattgccaccatccgtagcggcaagcggaccttctacaccggcggtggcctgatgaccttctacctgtggcggatcctgtacctgagcatgatcctgagcgcccgcagcagactgaaggtgttcttcgactggatcaagctggcattcttcaagagggactttttcaagggcctgtga

SEQ ID NO: 45 - DNA, 1542 bp, Artificial Sequence
  source: /note="Description of Artificial Sequence: Synthetic polynucleotide"
atgctgagcaagaacctgtacagcaacaagcggctgctgaccagcaccaacaccctcgtgcgcttcgccagcaccagatccaccggcgtcgaaaacagcggagctggccccaccagcttcaagaccatgaaggtcatcgacccccagcacagcgacaagccaaacgtgctgatcctgggctctggctggggcgccatcagctttctgaagcacatcgacaccaagaagtacaacgtctccatcatcagccccagaagctacttcctgttcacccccctgttacccagcgcccctgtgggaacagtggacgagaagtccatcatcgagcccatcgtgaacttcgccctgaagaaaaagggcaacgtcacctactacgaggccgaggccaccagcatcaaccccgaccggaacaccgtgaccatcaagagcctgagcgccgtttcccagctgtaccagcccgagaaccacctgggcctgcaccaggccgagcccgccgagattaagtacgactacctgatcagcgccgtgggcgccgagcccaacacctttggaatccccggcgtgaccgactacggccacttcctgaaagagatccccaacagcctggaaatccggcggaccttcgccgccaatctggaaaaggccaacctgctgcctaagggcgaccccgagcggagaaggctgctgagcatcgtggtcgtgggcggaggccccacaggcgtggaagctgctggcgagctgcaggactacgtgcaccaggacctgcggaagttcctgcccgccttggccgaggaagtgcagattcacctggtggaagctctgcccatcgtgctgaacatgttcgagaagaagctgagcagctacgcccagagccacctggaaaacacctccatcaaggtgcacctgagaaccgccgtcgccaaggtggaagagaagcagctgctggccaagaccaagcacgaggacggcaagataaccgaggaaaccattccctacggcaccttgatttgggccaccggcaacaaggccagacccgtgatcactgacctgttcaagaagatccccgagcagaacagcagcaagagaggcctggccgtgaacgacttcctgcaggtcaaaggcagcaacaacatcttcgccattggcgacaacgcctttgccggcctgcctcctacagcccaggtggcccaccaggaggccgagtacctggccaagaacttcgataagatggcccaaatacccaatttccagaagaacctgtcctcccggaaggataagatcgacctgctgttcgaggaaaacaacttcaaacccttcaagtacaacgatctgggcgccctggcatacctgggcagcgaaagagccattgccaccataagaagcggtaagcggaccttctacaccggtggtggcctgatgaccttctacctgtggcggatcctgtacctgtccatgatcctgagcgcccgcagcagactgaaggtgttcttcgactggatcaaactggccttcttcaagagggacttcttcaagggcctgtga

SEQ ID NO: 46 - DNA, 1542 bp, Artificial Sequence
  source: /note="Description of Artificial Sequence: Synthetic polynucleotide"
atgctgtcgaagaatctgtacagcaacaagcggctgctgaccagcaccaacaccctcgtgcgcttcgccagcaccagatccaccggcgtcgaaaacagcggggctggccctaccagcttcaagaccatgaaagtcatcgacccccagcacagcgacaagcccaacgtgctgatcctgggctctggctggggcgctatcagctttctgaagcacatcgacaccaagaagtacaacgttagcatcatcagccccagaagctacttcctgttcacccccctgctgccctctgcccctgtgggaaccgtggacgagaagtccatcatcgagcccatcgtgaacttcgccctgaagaaaaagggcaacgtcacctactacgaggccgaggccaccagcatcaaccccgaccggaacaccgtgaccatcaagagcctgagcgccgtgtcccagctgtaccaacccgagaaccatctgggcctgcaccaggccgagcccgccgagattaagtacgactacctgatcagcgccgtgggcgccgagcccaacacctttggaatccccggcgtgaccgactacggccacttcctgaaagagattcccaacagcctggaaatccggcggaccttcgccgccaacctggaaaaggctaacctgctgcctaagggcgaccccgagcggagaaggctgctgagcatcgtcgtcgtgggcggaggccccacaggcgtggaagctgctggcgagctacaggactacgtgcaccaggacctgagaaagttcctccccgccctggccgaggaagtgcagattcacctggtggaagccctgcccatcgtgctgaacatgttcgagaagaagctgagcagctacgcccagagccacctggaaaacacctccatcaaggtgcacctgagaaccgctgtggccaaggtggaagagaagcagctgctggccaagaccaagcacgaggacggcaagattaccgaggaaaccatcccctacggcaccctgatttgggccaccggcaacaaggccagacccgtgatcactgacctgttcaagaagatccccgagcagaacagcagcaagagaggcctggccgtgaacgacttcctgcaggtgaaaggcagcaacaacatcttcgccattggtgacaacgcctttgccggcctgcctcctacagcccaggtggcccaccaggaagccgagtacctggccaagaacttcgacaagatggcccaaatccccaatttccagaagaacctatcctccagaaaggataagatcgacctgctgttcgaggaaaacaacttcaagcccttcaagtacaacgacctgggcgccctggcctacctgggcagcgaaagagccattgccaccatcagaagcggcaagcggaccttctacaccggcggaggcctgatgaccttctacctgtggagaatcttgtacctgagcatgatcctgagcgcccgcagcagactgaaggtgttcttcgactggatcaaactggcctttttcaaaagggacttcttcaagggcctgtga

SEQ ID NO: 47 - DNA, 1542 bp, Artificial Sequence
  source: /note="Description of Artificial Sequence: Synthetic polynucleotide"
atgctgagcaagaacctgtacagcaacaagcggctgctgaccagcaccaacaccctcgtgcgcttcgccagcaccagatccacaggcgtcgaaaacagcggggctggccccaccagcttcaagaccatgaaggtcatcgaccctcagcacagcgacaagcccaacgtgctgatcctgggctctggctggggcgctatcagctttctgaagcacatcgacaccaagaagtacaacgtcagcatcatcagccccagaagctacttcttatttacccccctgttacccagcgcccctgtgggaaccgtggacgagaagtccatcatcgagcccatcgttaacttcgccctgaagaaaaagggcaacgtcacctactacgaggccgaagccacctctatcaaccccgaccggaacaccgttaccatcaagagcctgagcgccgtgtcccagctgtaccagcccgagaaccacctgggcctgcaccaagccgagcccgctgagattaagtacgactacctgatcagcgccgtgggcgccgagcccaacacctttggaatccccggcgtgactgactacggccacttcctgaaagagatccccaacagcctggaaatccggcggactttcgccgccaatctggagaaggccaacctgctgcctaagggcgaccccgagcggagaaggctgctgagcatcgtggtcgtgggcggaggccccacaggcgtggaagctgctggcgagctgcaggactacgtgcaccaggacctgcggaagttcctgcccgccctggccgaggaagtgcagattcacctggtggaagccctgcccatcgtgctgaacatgttcgagaagaagcttagcagctacgcccagagccacttagaaaacacctccatcaaggtgcacctgagaaccgccgtggccaaggtggaagagaagcagctgctggcaaagaccaagcacgaggacggcaaaataaccgaggaaaccatcccctacggcactctgatttgggccaccggcaacaaggccagacccgtgatcaccgacctgttcaagaagattcctgagcagaacagcagcaagcggggcctggccgtgaacgacttcctgcaggtcaaaggcagcaacaacatcttcgccatcggcgacaacgcctttgccggcctgcctcctacagcccaggtggcccaccaggaagccgagtacctggccaagaatttcgacaagatggcccagatccccaatttccagaagaacctgtcctcccggaaggataagatcgacctcctgttcgaggagaacaacttcaagcccttcaagtacaacgacttaggcgccctggcctacctgggcagcgaaagagccattgccaccatcagaagcggcaagagaaccttctacaccggcggaggcctgatgaccttctacctgtggcggatcctgtacctgagcatgatcctgagcgcccgcagcagactgaaggtgttcttcgactggatcaagctggccttcttcaagagggacttcttcaagggcctgtga

SEQ ID NO: 48 - DNA, 1542 bp, Artificial Sequence
  source: /note="Description of Artificial Sequence: Synthetic polynucleotide"
atgctaagcaagaacctgtatagtaacaagcggctgctgaccagcaccaacaccctcgtccgcttcgccagcaccagatccaccggcgtcgaaaactccggggctggccccaccagcttcaagaccatgaaggtcatcgacccccagcacagcgacaagcccaacgtgctgatcctgggctctggctggggcgccatcagctttctgaagcacatcgacaccaagaagtacaacgtctccatcatcagccccagaagctacttcctgttcacccccctgctgcccagcgcccctgtgggaaccgtggacgagaagtccatcatcgagcccatcgtgaattttgccctgaagaaaaagggcaacgtcacctactacgaggccgaggccaccagcatcaatcccgaccggaacaccgtgaccataaaaagcttaagcgccgtgtcccagctgtaccagcccgagaaccatctgggcctgcaccaggccgagcctgccgagattaagtacgactacctgatcagcgccgtgggcgccgagcccaacacctttggaatccccggcgtgaccgactacggccacttcctgaaagaaatccccaacagcctggaaatccggcggaccttcgccgccaatctggaaaaggccaacctgctgcctaagggcgaccccgagcggagaaggctgctgagcatcgtcgtcgtgggcggaggccccacaggtgtggaagctgctggcgagctgcaggactacgtgcaccaggacctgcggaagttcctgcccgccctggccgaggaagtgcagattcacctggtggaagccctgcccatcgtgctgaacatgttcgagaagaagctgtcaagctacgcccagagccacctggaaaacacctccatcaaggtgcacctgagaaccgccgtggccaaggtggaagagaagcagctgctggccaagaccaagcacgaggacggcaagattaccgaggaaaccatcccctacggcaccctgatttgggccaccggtaacaaggccagacccgtgatcaccgacctgttcaagaagatccccgagcagaacagcagcaagcggggcctggccgtgaacgacttcctgcaggtcaaaggcagcaacaacatcttcgccatcggcgacaacgcctttgccggcctgcctcctacagcccaggtggcccaccaggaagccgagtacctggccaagaacttcgacaagatggcccagatccccaatttccaaaagaacctgtcctcccggaaggataagattgacctgttgttcgaggaaaacaacttcaaacccttcaagtacaacgacctgggcgccctggcctacctgggcagcgaaagagccattgccaccatcagaagcggcaagcggaccttttacaccggcggtggcctgatgaccttctacctgtggcggatcctgtacctgagcatgatcctgagcgcacgctcgagactgaaggtcttcttcgactggatcaagctggccttcttcaagagggacttcttcaagggcctgtga

SEQ ID NO: 49 - DNA, 1542 bp, Artificial Sequence
  source: /note="Description of Artificial Sequence: Synthetic polynucleotide"
atgctgagcaagaacctgtatagcaacaagcggctgctgaccagcaccaacaccctcgtgcgcttcgccagcaccagatccaccggcgtcgaaaacagcggggcaggccccaccagcttcaagaccatgaaggtcatcgacccccagcacagcgacaagcccaacgtgctgatcctgggctctggctggggcgccatcagctttctgaagcacatcgacaccaagaagtacaacgtcagcatcatcagccccagaagctatttcctgttcacccccctgctgccctctgcccctgtgggaaccgtggacgagaagtccatcatcgagcccatcgtgaacttcgccctgaagaaaaagggcaacgtcacctactacgaggccgaggccaccagcatcaaccccgaccggaacaccgtgaccatcaagagcctgtctgccgtgtcccagctataccagcccgagaaccacctagggctgcaccaggccgagcccgccgagattaagtacgactacctgatcagcgccgtgggcgccgagcccaacacctttggaatccccggcgtgaccgactacggccacttcctgaaagagatccccaacagcctggaaatccggcggaccttcgccgccaacctggaaaaggccaacctgctgcctaagggcgaccccgaacggagaaggctgctgagcatcgtggtcgtgggcggaggccccacaggcgtggaagctgctggcgagctgcaggactacgttcaccaggacctgagaaagttcctgcccgccctggccgaggaagtgcagattcacctggtggaagccctgcccatcgtgctgaatatgttcgagaagaagctgagcagctacgcccagagccacctggaaaacacctccatcaaggtgcacctgagaacggccgtggccaaagtggaagagaagcagctgctggccaagaccaagcacgaagacggcaagattaccgaggaaaccatcccctacggtaccctgatttgggccaccggcaacaaggccagacccgtgatcaccgacctgttcaagaaaatccccgagcagaacagcagcaagcggggcctggccgtgaatgacttcctgcaggtcaaaggcagcaacaacatcttcgccatcggcgacaacgcatttgccggcttgcctcctacagcccaggtggcccaccaggaagccgagtacttggccaagaacttcgacaagatggctcagatacccaatttccaaaagaacctgtcttcccggaaggataagatcgatctgctgttcgaggaaaacaacttcaagcccttcaagtacaacgatctgggcgccctggcctacctgggcagcgaaagagccattgccaccatcagaagcggcaagcggaccttttacaccggcggaggcctgatgaccttctacctgtggcggatcctgtacctgagcatgatcctgagcgcccgcagcagactgaaggtgttcttcgactggattaagctggccttcttcaagagggacttcttcaagggcctgtga

SEQ ID NO: 50 - DNA, 1542 bp, Artificial Sequence
  source: /note="Description of Artificial Sequence: Synthetic polynucleotide"
atgctgagcaagaacctgtatagcaacaagcggctgctgaccagcaccaataccctcgtgcgcttcgccagcaccagatccaccggcgtcgaaaacagcggggctggccccacctctttcaagaccatgaaggtcatcgacccccagcacagcgacaagccaaacgtgctgatcctgggctctggctggggcgccatcagctttctgaagcacatcgacaccaagaagtacaacgtcagcatcatcagccccagaagctacttcctgttcacccccttgctgcccagcgcccctgtgggaaccgtggacgaaaagtccatcattgagcccatcgtgaacttcgccctgaagaaaaagggcaacgttacctactacgaggccgaagccaccagcatcaaccccgaccggaacaccgtgaccatcaagtcactgagcgccgtgagccagctgtaccagcctgagaaccacctgggcctgcaccaggccgagcccgccgagattaagtacgactacctgatcagcgccgtgggcgccgagcccaacacctttggaatccccggcgtgaccgactacggccacttcctgaaagagatccccaacagcctggaaatccggcggaccttcgccgccaacctggaaaaggccaacctgctgcctaagggcgaccccgagcggagaaggctgctgagcattgtggtcgtgggcggaggccccacaggcgtggaagctgctggcgagctgcaggactacgtgcaccaggacctgcggaagttcctgcccgccctggccgaggaagtgcagattcacctggtggaagccctgcccatcgtgctgaatatgttcgagaagaagctgagcagctacgcccagagccacctggaaaacacctccatcaaggtgcacctgagaaccgccgtggccaaggtggaagagaagcagctgctggccaagaccaagcacgaggacggcaagattaccgaggaaaccattccctacggcaccctgatttgggccacgggcaacaaggccagacccgtgatcaccgacctgttcaagaagatccccgagcaaaacagcagcaagcggggcctggccgtgaacgacttcctgcaggtgaaaggcagcaacaacatcttcgccatcggcgacaacgcctttgccggcctgcctcctacagcccaagtggcccaccaggaagccgagtacttggccaagaacttcgacaagatggcccagatccccaatttccagaagaacctgtcctcccggaaggataagatcgacctgctgttcgaggaaaacaacttcaagcccttcaagtacaacgacctgggcgccttagcctacctgggctccgaaagagccattgccaccataagaagcggcaagcggaccttttacaccggcggaggcctgatgaccttctacctgtggcggatcctgtacctgagcatgattctgtctgcccgctcgagactgaaggtgtttttcgactggatcaaactggccttcttcaagagggacttcttcaagggcctgtga

SEQ ID NO: 51 - DNA, 1542 bp, Artificial Sequence
  source: /note="Description of Artificial Sequence: Synthetic polynucleotide"
atgctgagcaagaacctgtacagcaacaagaggctgctcaccagcaccaacaccctcgtccgcttcgccagcaccagatccaccggcgtcgaaaacagcggggctggccccaccagcttcaagaccatgaaggtcatcgacccccagcacagcgacaagcccaacgtgctgatcctgggctctggctggggcgccatcagctttctgaagcacatcgacaccaagaagtacaacgtcagcatcatcagccccagaagctacttcttattcacccccctgctgcccagcgcccctgtggggaccgtggacgagaagtccatcatcgagcccatcgtgaacttcgctctgaagaaaaaggggaacgtcacctactacgaggccgaggccaccagcatcaaccccgaccggaacaccgtgaccatcaagagcctgagcgccgtgtcccagctgtaccagcccgagaaccacctgggcctgcaccaggcagagcccgccgagattaagtacgactatctgatcagcgccgtgggcgccgagcccaacacctttggaatccctggcgtgaccgactacggccacttcctgaaagagatccccaacagcctggaaatacggcggaccttcgccgccaacctggaaaaggccaacttactgcctaagggcgaccccgagcggagaaggctgctgagcatcgtggtcgtgggcggaggccccacaggtgtggaagctgctggtgaactgcaggactacgtgcaccaggacctgcggaagttcctgcccgccctggccgaggaagtgcagattcacttggtggaagccctgcccatcgtgctgaacatgttcgagaagaagctgagcagctacgcccagagccacctggaaaacacctccatcaaggtgcacctgagaaccgctgtggccaaggtggaagagaagcagttgctggccaagaccaagcacgaggacggcaagattaccgaggaaaccatcccctacggcaccctgatttgggccaccggcaacaaggccagacccgtgatcaccgacctgttcaagaagatccccgagcagaacagcagcaagcggggcctggccgtgaacgacttcctgcaggtgaaaggcagcaacaacatcttcgccatcggcgacaacgcctttgccggcctgcctcctacagcccaggtagcccaccaggaagccgagtacctggccaagaacttcgacaagatggcccagatccccaatttccagaagaatctgtcctcccggaaggataagatcgatctgctgttcgaggaaaacaactttaagcccttcaagtacaacgatctgggcgccctggcctacctgggcagcgaaagggccattgccaccatcagaagcggcaagcggaccttctacaccggcggaggcctgatgaccttctacctgtggcggatcctgtacctgagcatgatcctgagcgcccgcagcagactgaaggtgttcttcgactggatcaagctggccttcttcaaaagggactttttcaaaggactgtga

SEQ ID NO: 52 - DNA, 1542 bp, Artificial Sequence
  source: /note="Description of Artificial Sequence: Synthetic polynucleotide"
atgctgagcaagaacctgtacagcaacaagcggctgctgaccagcaccaacaccctcgtgcgcttcgccagcaccagatccaccggcgtcgaaaacagcggggctggccccacaagcttcaagaccatgaaggtcatcgacccccagcacagcgacaagcccaacgtgctgatcctgggctctggctggggcgccatcagctttctgaagcacatcgacaccaagaagtacaacgtcagcatcatcagccccagaagctacttcctgtttacccccctgctgcccagcgcccctgtgggaaccgtggacgagaagtccatcatcgagcccatcgtgaacttcgctctgaagaaaaaggggaacgtcacctactacgaggcagaggccaccagcatcaaccccgaccggaataccgtgaccatcaagagcctgagcgccgtttcccagctgtaccagcccgagaaccacctgggcctgcaccaggccgagcccgccgagattaagtacgactacctgatcagcgccgtgggcgcggaacctaacacctttggaatccccggcgtgaccgactacggccacttcctgaaagagatccccaactctctggaaatacggcggaccttcgccgccaacctggaaaaggccaacctgctgcctaagggcgaccccgagcggagaaggctgctgagcatcgtggtcgtgggcggtggccccacaggcgtggaagccgctggcgagctgcaggactacgtgcaccaggacctgcggaagttcctgcccgcactggccgaggaagtgcagattcacctggtggaagccctgcccatcgtgctgaacatgttcgagaagaagctgagcagctacgcccagagccacctggaaaacacctcgatcaaagtgcacctgagaaccgccgtcgccaaggtggaagagaagcagttgctggccaagaccaagcacgaggacggcaagattaccgaggaaactatcccctacggtaccctgatttgggccaccggcaacaaggccagacccgtgatcaccgacctgttcaagaaaatccccgagcagaacagcagcaagcggggactggccgtgaacgacttcctgcaggtcaaaggcagcaacaacatcttcgccatcggcgacaacgcctttgccggcttgcctcctacagcccaggtggcccaccaggaagccgagtacctggccaagaacttcgacaagatggcccagatacccaatttccagaagaacctgtcttcccggaaggataagatcgacctgctgttcgaggaaaacaacttcaagcctttcaagtacaacgacctgggcgccctggcctacctgggcagcgaaagagccattgccaccataagaagcggcaagcggaccttctacaccggcggaggcctgatgaccttctacctgtggcggatcctgtacctgtccatgatcctgagcgcccgcagcagactgaaggtgttcttcgactggatcaagctggccttcttcaagagggacttcttcaagggcctgtga

SEQ ID NO: 53 - DNA, 1542 bp, Artificial Sequence
  source: /note="Description of Artificial Sequence: Synthetic polynucleotide"
atgctgagcaagaacctgtacagcaacaagcggttgctgaccagcaccaacaccctcgtccgcttcgccagcaccagatccaccggcgtcgaaaacagcggggctggccccaccagcttcaagaccatgaaggtcatcgacccccagcacagcgacaagcccaacgtgctgatcctgggctctggctggggcgccatcagctttctgaagcacatcgacaccaagaagtacaacgtcagcatcatcagccccagaagctacttcttattcacccccctgctgcccagcgcccctgtggggaccgtggacgagaagtccatcatcgagcccatcgtgaacttcgccctgaagaaaaagggcaacgtcacctactacgaggccgaggccaccagcatcaatcccgaccggaacaccgtgaccatcaagagcttaagcgccgtgtcccagctgtaccagcccgagaaccacctgggcctgcaccaggcagaacccgccgagattaagtacgactacctgatcagcgccgtgggcgccgagcctaacacctttggaatccccggcgtgaccgactacggtcacttcctgaaagagatccccaacagcctggaaatccggcggaccttcgccgccaacctggaaaaggccaacctgctgcctaagggcgaccccgaacggagaaggctgctgagcatcgtggtcgttggcggaggccccacaggtgtagaagctgctggcgagctgcaggactacgtgcaccaggacctgcggaagttcctgcctgccctggccgaggaagtccagattcacctggtggaagccctgcccatcgtgctgaacatgttcgagaagaagctgagcagctacgcccagagccatctggaaaacacctccatcaaggtgcacctgagaaccgccgtggccaaagtggaagagaagcagctgctggccaagaccaagcacgaggacggcaagattaccgaggaaaccatcccctacggtaccctgatttgggccaccggcaacaaggccagacccgtgatcaccgaccttttcaagaagattcccgagcagaacagctccaagcggggcctggccgtgaacgacttcctgcaggtcaaaggcagcaacaacatcttcgccatcggcgacaacgcatttgccggcctgcctcctacagcccaggtggcgcaccaggaagccgagtacctggccaagaacttcgacaagatggcccagatccccaatttccagaagaacctgtcctcccggaaggataagatcgacctcctgttcgaggaaaacaacttcaagcctttcaagtacaacgacctgggcgccctggcctacctgggcagcgaaagagccattgcaaccataagaagcggcaagcggaccttctacaccggcggaggcctgatgaccttctacctgtggcggatcctgtacctgagcatgatcctgagcgcccgcagcagactgaaggtgttcttcgactggatcaagctggcattcttcaagagggacttcttcaagggcctgtga

SEQ ID NO: 54 - DNA, 1542 bp, Artificial Sequence
  source: /note="Description of Artificial Sequence: Synthetic polynucleotide"
atgctgagcaagaatctgtacagcaacaagcggctgctgaccagcaccaacaccctcgtgcgcttcgccagcaccagatccaccggcgtcgaaaacagcggggctggccccaccagcttcaagaccatgaaagtcatcgacccccagcacagcgacaagcccaacgtgctgatcctgggctcgggctggggcgccatcagctttctgaagcacatcgacaccaagaagtacaacgtcagcatcatcagccccagaagctacttcctgttcacccccctgctgcccagcgcccctgtgggaaccgtggacgagaagtccatcatcgagcccatcgtgaactttgccctgaagaaaaagggcaacgtcacctactacgaggccgaggccacctctatcaaccccgaccggaacaccgtgaccatcaagagcctgagcgccgtgtcccagctgtaccagcccgagaaccacctaggcctgcaccaggccgagcccgccgagattaagtacgactacctgatcagcgccgtgggcgccgagcccaacacctttggaatccccggcgtgaccgactacggccacttcctgaaagagatccccaacagcttggaaatacggcggaccttcgccgccaacctggaaaaggccaacctgctgcctaagggtgaccccgagcggagaaggctgctgagcatcgtggtcgtgggcggaggccccacaggcgtggaagctgctggcgaactgcaggactacgtgcaccaggacctgcggaagttcctgcccgccctggccgaggaagtgcagattcacctggtggaagccctgcccatcgtgctgaacatgttcgagaagaagctgagctcatacgcccagagccacctggaaaacacctccatcaaggtgcacctgagaaccgccgtggccaaggtggaagagaagcaactgctggccaagaccaaacacgaggacggcaagattaccgaggaaaccatcccctacggcaccctgatttgggccaccggcaacaaggccagacccgtgatcaccgaccttttcaagaagatccccgagcagaacagctccaagcggggcctggccgtgaacgacttcctgcaggtcaaaggcagcaacaacatcttcgccatcggcgacaatgcctttgccggcctgcctccaacagcccaggtagcccaccaggaggccgagtacttggccaagaacttcgacaagatggcccagatacccaatttccagaagaatctgtcctcacggaaggataagatcgacctgctgttcgaggagaacaacttcaagcccttcaagtacaacgacctgggcgccctggcctacctgggcagcgaaagagccattgccaccatccgtagcggcaagcggaccttctacaccggtggtggcctgatgaccttctacctgtggcggatcttgtacctgagcatgatcctgagcgcccgcagcagactgaaggtgttcttcgactggatcaagctggccttcttcaagagagacttcttcaagggcctgtga

SEQ ID NO: 55 - DNA, 1542 bp, Artificial Sequence
  source: /note="Description of Artificial Sequence: Synthetic polynucleotide"
atgctgagcaagaacttgtacagcaacaagcggctgctgaccagcaccaataccctcgtgcgcttcgccagcaccagatccaccggcgtcgaaaacagcggggctggccccaccagcttcaagaccatgaaggtcatcgacccccagcacagcgacaagcccaacgtgctgatcctgggctctggctggggcgccatcagctttctgaagcacatcgacaccaagaagtacaacgtcagcatcatcagccccagaagctacttcctgttcacccccctgctgcccagcgcccctgtgggaaccgtagacgagaagtccattatcgagcccatcgtgaacttcgccctgaagaaaaagggcaacgtcacctactacgaggcagaggccaccagcatcaaccccgaccggaacaccgtgaccatcaagagcctgagcgccgtgtcccagctgtaccagcccgagaaccacctgggcctgcaccaggccgagcccgccgagattaagtacgattacttaatcagcgccgtgggtgcggagcccaacacctttggaattcccggcgtgaccgattacggccacttcctgaaagagattcccaacagcctggaaatccggcggaccttcgccgccaacctggaaaaggccaacctgttgcctaagggcgaccccgagcggagaaggctgctgagcatcgtggtcgtgggcggaggccctacaggcgtggaagctgctggcgagctgcaggactacgtgcaccaggacctgcggaagttcctgcccgccctggccgaagaagtgcagattcacctggtggaagccctgcccatcgtgctgaacatgttcgagaagaagctgagcagctacgcccagagccacctggaaaacacctccatcaaggtgcacctgagaaccgccgtcgccaaggtggaagagaagcagctgttggccaagaccaagcacgaggacggcaagattaccgaggaaactatcccctacggcaccttgatttgggccaccggcaacaaggccagacccgtgatcaccgacctgttcaagaagatccctgagcagaacagcagcaagcggggcctggccgtgaacgacttcctgcaggtcaaaggcagcaacaacatcttcgccatcggcgacaacgcctttgccggcctgcctcctacagcccaggtggcccaccaagaagccgagtacctggccaagaacttcgacaaaatggcccagatccccaatttccagaagaacctatcctccagaaaggataagattgacctgctgttcgaggaaaacaacttcaagcccttcaagtacaacgacctgggcgccctggcctacctgggcagcgaaagagccattgccaccatcagaagcggcaagcggaccttctacaccggcggtggcctgatgaccttctacctgtggcggatcctgtacttgagcatgatcctaagcgccagaagcagactgaaggtgttcttcgactggatcaagctggccttcttcaagagggacttcttcaagggcctgtga

SEQ ID NO: 56 - DNA, 1542 bp, Artificial Sequence
  source: /note="Description of Artificial Sequence: Synthetic polynucleotide"
atgctgagcaagaacctgtacagcaacaagcggctgctgaccagcaccaacaccctcgtgcgcttcgccagcaccagatccacaggcgtcgaaaacagcggggctggccccaccagcttcaagaccatgaaggtcatcgacccccagcacagcgacaagcccaacgtgctgatcctgggttctggctggggcgctatctcgtttctgaagcacatcgacaccaagaagtacaacgtctccatcatcagccccagaagctacttcctgttcacccccctgctgcccagcgcacctgtggggaccgtggacgaaaagtccatcatcgagcccatcgtgaacttcgccctgaagaaaaagggcaacgtcacctactacgaggccgaggccaccagcatcaaccccgaccggaacaccgtgaccatcaagagcctgagcgccgtgagccagctgtaccagcccgagaaccatctggggctgcaccaggccgagcccgccgagattaagtacgactacctgatcagcgccgtgggcgccgagcccaacacctttggaatccctggcgtgaccgattacggccacttcctgaaagagatccccaacagcctggaaatccggcggacctttgccgccaacctggaaaaggccaacctgctgcctaagggcgaccccgagcggagaagactactgagcatcgtggtcgtgggcggaggccccacaggcgtggaagccgctggcgagctgcaggactacgtgcaccaggacctgcggaagttcctccccgccctggccgaggaagtgcaaattcacctggtggaagctctgcccatcgtgctgaacatgttcgagaagaagctgagcagctacgcccagagccacctggaaaacacctccatcaaggtgcacctgagaaccgccgtggccaaggtggaagagaagcagctgctggccaagaccaagcacgaggacggcaagattaccgaggaaaccatcccctacggcactctgatttgggccaccggcaacaaggccagacccgtgatcaccgacctgttcaagaagatccccgagcagaacagcagcaagcggggcctggccgtgaacgacttcctgcaggtcaaaggcagcaacaacatcttcgccatcggcgacaacgcctttgccgggttgcctccaacagcccaggtggcccaccaggaggccgagtacctggccaagaacttcgacaagatggcccagatccccaatttccagaagaacctgtcctcccggaaggataagatcgatctgctgttcgaggaaaacaacttcaagcccttcaagtacaacgacctgggcgccctggcctacctgggcagcgaaagagccattgccaccatcagaagcggtaagcggaccttctacaccggcggaggcctgatgaccttctacctgtggcggatcttgtacctgagcatgattctgagcgcccgcagcagactgaaggtgttcttcgactggatcaagctggccttcttcaagagggacttcttcaagggcctgtga

SEQ ID NO: 57 - DNA, 1542 bp, Artificial Sequence
  source: /note="Description of Artificial Sequence: Synthetic polynucleotide"
atgctgagcaagaacctgtacagcaacaagcggctgctgaccagcaccaacaccctcgtgcgcttcgccagcaccagatccaccggggtcgaaaactccggagctggccccacctctttcaagaccatgaaggtcatcgacccccagcacagcgacaagcccaacgtgctgatcctgggctctgggtggggcgccatcagctttctgaagcacatcgacaccaagaagtacaacgtcagcatcatcagccccagaagctacttcttattcacccccctgctgcccagcgcccctgtgggaaccgtggacgagaagtccatcattgagcccatcgtgaacttcgctctgaagaaaaagggcaacgtcacctactacgaggccgaggccaccagcatcaaccccgaccggaacaccgtgaccatcaagagcctgagcgccgtgtcccagctgtaccagcccgagaaccacctgggcctgcaccaggcagagcccgccgagattaagtacgactacctgatcagcgccgtgggcgccgagcctaacacatttggaatccccggcgtgaccgactacggccacttcctgaaagaaatccccaacagcctggaaatccggcggaccttcgccgccaacctggaaaaggccaacctgctgcctaagggcgaccccgagcggagaaggctgctgagcatcgtggtcgtgggcggaggccccacaggcgtggaagctgctggcgagctacaggactacgtgcaccaggacctgagaaagtttctgcccgccctggccgaggaagtgcagattcacctggtggaagccctgcccatcgtgctgaacatgttcgagaagaagctgtcaagctacgcccagagccacctggaaaacacctccatcaaggtgcatctgagaaccgccgtggccaaggtggaagagaagcagctgctggccaagaccaagcacgaggacggtaagattaccgaggaaaccatcccctacggcaccctgatttgggccaccggcaacaaggccagacccgtaatcactgacctgttcaagaaaatccccgagcagaacagcagcaagcggggcctggccgtgaacgacttcctgcaggtcaaaggcagcaacaacatcttcgccatcggcgacaacgcctttgccggcctgcctcctacagcccaggtggcccaccaggaggccgagtacctggccaagaatttcgacaagatggctcagatccccaatttccagaagaacctgtcctcccggaaggataagatcgacctcctgttcgaggaaaacaacttcaagcccttcaagtacaacgacctgggcgccctggcctacctgggcagcgaaagagccattgccaccatcagaagcggcaagcggaccttctacaccggcggaggcttaatgaccttctacctgtggcggatcctgtacctgagcatgattctgagcgcccgcagcagactgaaggtgttcttcgactggatcaagctggccttcttcaagagggacttcttcaagggactgtag

SEQ ID NO: 58 - DNA, 1542 bp, Artificial Sequence
  source: /note="Description of Artificial Sequence: Synthetic polynucleotide"
atgctgagcaagaacctgtacagcaacaagcggctgctgaccagcaccaacaccctcgtgagattcgccagcaccagatccaccggcgtcgaaaacagcggggctggccccaccagcttcaagaccatgaaagtcatcgacccccagcacagcgacaagcccaacgtgctgatcctgggctctggctggggcgccatcagctttctgaagcacatcgacaccaagaagtacaacgtcagcatcatcagccccagaagctacttcctgttcacccctctgctgcccagcgcccctgtgggaaccgtggacgagaagtccatcatcgagcccatcgtgaacttcgccctcaagaaaaagggcaacgtcacctactacgaggccgaggccaccagcatcaaccccgaccggaacaccgtgaccatcaagagcctgagcgccgtgtcccagctgtaccagcccgagaaccacctgggcctgcaccaggccgagcccgccgagattaagtacgactacctgatcagcgccgtaggtgccgagcccaacacctttggaatccccggcgtgaccgactacggtcacttcctgaaagagatccccaacagcctggaaatccggcggaccttcgccgccaacctggaaaaggccaacctgctgcctaagggcgaccccgagcggagaaggctgctgtccattgtggtcgtgggcggaggccccacaggcgtggaagctgctggcgagctgcaggattacgtgcaccaggacctgcggaagttcctgcccgccctggccgaggaagtccagattcacctggtggaagccctgcccatcgtgctgaatatgttcgagaaaaagctgagcagctacgcccagagccacctggaaaacacctccatcaaggtgcacctgagaacggccgtggccaaggtggaagaaaagcagctgctggccaagaccaagcacgaggacggcaagataaccgaggaaaccatcccatacggcactctgatttgggccaccggcaacaaggccagacccgtgatcaccgacctgttcaagaagatccccgagcagaacagcagcaagcggggcctggccgtgaacgacttcctgcaggtcaaaggcagcaacaacatcttcgccatcggcgacaacgcctttgccggcctgccacctaccgcccaggtggcccaccaggaagccgagtacctggccaagaacttcgataagatggcccagatccccaatttccagaagaacctatcttcacggaaggataagattgacctcctgttcgaggaaaacaacttcaagcccttcaagtacaacgacctgggcgccctggcctacctgggcagcgaaagagccattgccaccatcagaagcggcaagcggaccttctacaccggcggaggcctgatgaccttctacctgtggagaatcttgtacctgagcatgatcctgagcgcccgcagcagactgaaggtgttcttcgactggatcaagctggccttcttcaagagggacttcttcaagggcctgtag

SEQ ID NO: 59 - DNA, 1542 bp, Artificial Sequence
  source: /note="Description of Artificial Sequence: Synthetic polynucleotide"
atgctgagcaagaacctgtacagcaacaagaggctgctgacctcgaccaacacgctcgtgcgcttcgccagcaccagatccaccggcgtcgaaaacagcggggctggccccaccagcttcaagaccatgaaggtcattgacccccagcacagcgacaagcccaacgtgctgatcctgggctctggctggggcgccatcagctttctgaagcacatcgacaccaagaagtacaacgtcagcatcatcagccccagaagctacttcctgttcacccccctgttacccagcgccccagtgggaaccgtggacgagaagtccatcatcgagcccatcgtgaacttcgctctgaagaaaaagggcaacgtcacctactacgaggccgaggccaccagcatcaaccccgaccggaacaccgtgaccatcaagagcctgagcgccgtgtcccagctgtaccagcccgagaaccacctgggcctgcaccaggccgagcccgctgagattaagtacgactacctgatcagcgccgtgggcgccgagcccaacacctttggaatccccggcgtgactgactacggccacttcctgaaagagattcccaacagcctggaaatccggcggaccttcgccgccaacctggagaaggccaacttactgcctaagggtgatcccgagcggagaaggctgctgagcatcgtggtcgtgggcggaggccccacaggcgtggaagctgctggcgagctgcaggactacgtgcaccaggacctgagaaagttcctgcccgccctggccgaggaagtgcagattcacctggtggaagccctgcccatcgtgctgaacatgttcgagaagaagctgagcagctacgcccagagccacctggaaaacacttccatcaaggtgcacctgagaaccgccgtggccaaggtggaagagaagcagctgctggccaagaccaagcacgaggacggcaaaattaccgaggaaaccatcccatacggcaccctgatttgggccaccggtaacaaggcaagacccgtgatcaccgacctgttcaagaagatccccgagcagaacagcagcaagcggggcctggccgtgaacgacttcctgcaggtcaaaggcagcaacaacatcttcgccatcggcgacaacgcctttgccggcctgcctcctacagcccaggtggcccaccaggaggccgagtatctggccaagaacttcgacaagatggcccagatccccaatttccagaagaacctgtcctcccggaaggataagatcgacctgctgttcgaggaaaacaacttcaagcccttcaagtacaacgatctgggcgccctggcctacctgggcagcgaaagggccattgcaaccatcagaagcggcaagagaaccttttacaccggcggaggcctgatgaccttctacctgtggagaatcctgtacctgagcatgatcctgagcgcacgcagcagactgaaggtgttcttcgactggatcaagctggccttcttcaagagggacttcttcaagggcctgtga

SEQ ID NO: 60 - DNA, 1542 bp, Artificial Sequence
  source: /note="Description of Artificial Sequence: Synthetic polynucleotide"
atgctgagcaagaacctgtacagcaacaagcggctgctgaccagcaccaacaccctcgtgcgcttcgccagcaccagatccaccggcgtcgaaaacagcggggctggccccaccagcttcaagaccatgaaggtcatcgacccccagcacagcgacaagcccaacgtgctgatcctgggctctggctggggcgccatcagctttctgaagcacatcgacaccaagaagtacaacgtcagcatcatcagccccagaagctacttcctgttcacccccctgctgcccagcgcccctgtgggaaccgtggacgagaagtccatcatcgagcccatcgtgaatttcgccctgaagaaaaagggcaacgtcacctactacgaggccgaggccaccagcatcaaccccgaccggaacaccgtgaccatcaagagcctgagcgccgtgtcccagctgtaccagcccgagaaccacctgggcctgcatcaagccgagcccgccgagattaagtacgactacttaatcagcgctgtaggcgccgagcccaacacctttggaatccccggcgtgaccgactacggccacttcctgaaagagatccccaacagcctggaaatcagacggactttcgccgccaacctggaaaaggccaacctgctgcctaagggtgatcccgagcggagaagactgctgagcatcgtggtcgtgggcggaggccccacaggcgtagaagctgctggcgagctgcaggactacgtgcaccaggacctgagaaagttcctgcccgccctggccgaggaagtgcagattcacctggtcgaagccctgcccatcgtgctgaacatgttcgagaagaagcttagcagctacgcccagagccatttagaaaacacctccatcaaggtgcacctgagaaccgccgtggccaaggtggaagagaagcaactgctggccaagaccaagcacgaggacggcaagattaccgaggaaaccatcccctacggcaccctgatttgggccaccggcaacaaggccagacccgtgatcactgaccttttcaagaagatccccgagcagaacagcagcaagcggggcctggcagtgaacgacttcctgcaggtcaaaggcagcaacaacatcttcgccatcggcgacaacgcctttgccggcctgcctcctacagcccaagtggcccaccaggaagccgagtacctggccaagaacttcgacaagatggcccagatccccaatttccagaagaacctgtcctcacggaaggataagatcgacctgctgttcgaggaaaacaacttcaagcccttcaaatacaacgatctgggcgccctggcctacctgggcagcgaaagagccattgccaccatcagaagcggcaagcggaccttctacaccggcggtggcttaatgaccttctacctgtggcggatcctgtacctgagcatgatcctgagcgcccgcagcagactgaaggtgtttttcgactggatcaagctggccttcttcaagagagacttcttcaagggcctgtga

SEQ ID NO: 61 - DNA, 1542 bp, Artificial Sequence
  source: /note="Description of Artificial Sequence: Synthetic polynucleotide"
atgctgagcaagaacttgtacagcaacaagcggctgctgaccagcaccaacacgctcgtgagattcgccagcaccagatccaccggggtcgaaaacagcggggctggccccaccagcttcaagaccatgaaggtcatcgacccccagcacagcgacaagcccaacgtgctgatcctgggctctggctggggcgccatttcgtttctgaagcacatcgacaccaagaagtacaacgtcagcatcatcagccccagaagctacttcctgttcacccccttgctgcccagcgcccctgtgggaaccgtggacgagaagtccatcatcgagcccatcgtgaacttcgccctgaagaaaaagggcaacgtcacctactacgaggccgaggccacctctatcaaccccgaccggaacaccgtgaccatcaaaagcctgagcgccgtgtcccagctataccagcccgaaaaccacctaggcctgcaccaggccgagcccgccgagattaagtacgactacctgatcagtgccgtgggcgccgagcccaacacctttggaatccccggcgtgaccgactacggccatttcctgaaagagatccccaacagcctggaaatccggcggaccttcgccgccaacctggagaaggccaacctgctgcctaagggcgaccccgagcggagaaggctgctgagcatcgtcgtcgtgggcggagggcccacaggcgtggaagctgctggcgagctgcaggactacgtgcaccaggacctgcggaagttcctgcccgccctggccgaagaagtgcagattcacctggtggaagccctgcccatcgtgctgaacatgttcgagaagaagctgagcagctacgcccagagccacctggaaaacacctccatcaaggtgcacctgagaaccgccgtggccaaggtggaagagaagcagctgctggccaagaccaagcacgaggacggcaagattaccgaggaaaccatcccctacggcaccctgatttgggccaccggcaacaaggccagacccgtgatcaccgacctgttcaagaagattcccgagcagaacagcagcaagcggggcttggccgtgaacgacttcctgcaggtcaaaggcagcaacaacatcttcgccatcggcgacaacgcctttgccggcctgcctcctacagcccaggtggcccaccaggaagccgagtatctggccaagaactttgataagatggcccagatccccaatttccagaagaacctgtcctcacggaaggataagatcgatctgctgttcgaggaaaacaacttcaagcccttcaagtacaacgacctgggcgccttagcctacctgggcagcgaaagggccattgccaccatcagaagcggcaagcggaccttctacaccggcggaggcttaatgaccttctacctgtggcggatcctgtacctgagcatgatcctgagcgcccgcagcagattaaaggtgttcttcgactggatcaagctggccttcttcaagagggacttcttcaagggcctgtga

SEQ ID NO: 62 - DNA, 1542 bp, Artificial Sequence
  source: /note="Description of Artificial Sequence: Synthetic polynucleotide"
atgctgagcaagaacctgtacagcaacaagcggctgctgaccagcaccaacaccctcgtgcgcttcgccagcaccagatccaccggcgtcgaaaacagcggggctggccccaccagcttcaagaccatgaaggtcatcgacccccagcacagcgacaagcccaacgtgctgatcctgggctctggctggggcgccatcagctttctgaagcacatcgacaccaagaagtacaacgtcagcatcatcagccccagaagctacttcctgttcacccccctgctgcccagcgcccctgtgggaaccgtggacgagaagtccatcatcgagcccatcgtgaacttcgccctgaagaaaaagggcaacgtcacctactacgaggccgaggccaccagcatcaaccccgaccggaacaccgtgaccatcaagagcctgagcgccgtgtcccagctgtaccagcccgagaaccacctgggcctgcaccaggccgagcccgccgagattaagtacgactacctgatcagcgccgtgggcgccgagcccaacacctttggaatccccggcgtgaccgactacggccacttcctgaaagagatccccaacagcctggaaatccggcggaccttcgccgccaacctggaaaaggccaacctgctgcctaagggcgaccccgagcggagaaggctgctgagcatcgtggtcgtgggcggaggccccacaggcgtggaagctgctggcgagctgcaggactacgtgcaccaggacctgcggaagttcctgcccgccctggccgaggaagtgcagattcacctggtggaagccctgcccatcgtgctgaacatgttcgagaagaagctgagcagctacgcccagagccacctggaaaacacctccatcaaggtgcacctgagaaccgccgtggccaaggtggaagagaagcagctgctggccaagaccaagcacgaggacggcaagattaccgaggaaaccatcccctacggcaccctgatttgggccaccggcaacaaggccagacccgtgatcaccgacctgttcaagaagatccccgagcagaacagcagcaagcggggcctggccgtgaacgacttcctgcaggtcaaaggcagcaacaacatcttcgccatcggcgacaacgcctttgccggcctgcctcctacagcccaggtggcccaccaggaagccgagtacctggccaagaacttcgacaagatggcccagatccccaatttccagaagaacctgtcctcccggaaggataagatcgacctgctgttcgaggaaaacaacttcaagcccttcaagtacaacgacctgggcgccctggcctacctgggcagcgaaagagccattgccaccatcagaagcggcaagcggaccttctacaccggcggaggcctgatgaccttctacctgtggcggatcctgtacctgagcatgatcctgagcgcccgcagcagactgaaggtgttcttcgactggatcaagctggccttcttcaagagggacttcttcaagggcctgtga

SEQ ID NO: 63 - DNA, 1542 bp, Artificial Sequence
  source: /note="Description of Artificial Sequence: Synthetic polynucleotide"
atgctatcgaagaatttgtatagtaacaagaggttgctcacctcgacgaatacgctagtcagattcgcttccaccagatccacaggggtggaaaactccggagcaggtcctacatcttttaagaccatgaaagtcattgaccctcagcacagcgacaaaccaaacgtgctgatactgggttcggggtggggagctatttcgtttttaaagcacattgacaccaagaagtacaacgtttccatcatctctcctagaagctatttcttatttacgcctttgttaccttctgcaccagttgggacagtagacgaaaagtcaattattgagcccatcgttaattttgctctcaagaaaaaggggaacgttacctactatgaggcagaagccacctctatcaatcccgacaggaataccgttaccataaaatcattatctgccgttagccagctataccaacctgaaaaccatctagggctgcatcaagcagaacctgctgaaattaagtacgattatttaatcagtgctgtaggtgcggaacctaacacatttggtattcctggggtcactgattacggtcatttcctgaaggaaattcccaactctttggaaataagaagaacttttgccgccaatctagagaaggctaacttattgccaaagggtgatcccgaaagaagaagactactgtccattgtcgtggttggtggtgggcctactggtgtagaggccgctggtgaactacaggattatgttcaccaggacctgagaaagtttctccctgcattggccgaagaagtccaaattcacttggtcgaagctctgcccatcgttttgaatatgtttgagaaaaagctttcatcatacgcgcaatcacatttagaaaacacttcgatcaaagtacatctgagaacggctgtcgccaaagttgaagaaaagcaattgttggcaaagaccaaacacgaagacggtaaaataaccgaagaaactattccatacggtactttgatttgggccacgggtaacaaggcaagaccggtaatcactgaccttttcaagaaaattcctgagcaaaactcgtccaagagaggattggcagtgaatgactttttgcaggtgaaaggcagcaacaacattttcgccattggtgacaatgcatttgctgggttgccaccaaccgcccaagtagcgcaccaagaggccgaatatttggccaagaattttgataaaatggctcaaataccaaatttccaaaagaatctatcttcaagaaaggataaaattgatctcttgttcgaggagaacaactttaaacctttcaaatacaacgatttaggtgccttagcatacctgggatccgaaagggccattgcaaccatacgttccggtaagagaacattttacaccggtggtggcttaatgaccttctacttatggagaattttgtacttgtccatgattctatctgcaagatcgagattaaaggtctttttcgactggattaaaatggcatttttcaaaagagacttttttaaaggattatag

SEQ ID NO: 64 - DNA, 1542 bp, Artificial Sequence
  source: /note="Description of Artificial Sequence: Synthetic polynucleotide"
atgctatcgaagaatttgtatagtaacaagaggttgctcacctcgacgaatacgctagtcagattcgcttccaccagatccacaggggtggaaaactccggagcaggtcctacatcttttaagaccatgaaagtcattgaccctcagcacagcgacaaaccaaacgtgctgatactgggttcggggtggggagctatttcgtttttaaagcacattgacaccaagaagtacaacgtttccatcatctctcctagaagctatttcttatttacgcctttgttaccttctgcaccagttgggacagtagacgaaaagtcaattattgagcccatcgttaattttgctctcaagaaaaaggggaacgttacctactatgaggcagaagccacctctatcaatcccgacaggaataccgttaccataaaatcattatctgccgttagccagctataccaacctgaaaaccatctagggctgcatcaagcagaacctgctgaaattaagtacgattatttaatcagtgctgtaggtgcggaacctaacacatttggtattcctggggtcactgattacggtcatttcctgaaggaaattcccaactctttggaaataagaagaacttttgccgccaatctagaggaggctaacttattgccaaagggtgatcccgaaagaagaagactactgtccattgtcgtggttggtggtgggcctactggtgtagaggccgctggtgaactacaggattatgttcaccaggacctgagaaagtttctccctgcattggccgaagaagtccaaattcacttggtcgaagctctgcccatcgttttgaatatgtttgagaaaaagctttcatcatacgcgcaatcacatttagaaaacacttcgatcaaagtacatctgagaacggctgtcgccaaagttgaagaaaagcaattgttggcaaagaccaaacacgaagacggtaaaataaccgaagaaactattccatacggtactttgatttgggccacgggtaacaaggcaagaccggtaatcactgaccttttcaagaaaattcctgagcaaaactcgtccaagagaggattggcagtgaatgactttttgcaggtgaaaggcagcaacaacattttcgccattggtgacaatgcatttgctgggttgccaccaaccgcccaagtagcgcaccaagaggccgaatatttggccaagaattttgataaaatggctcaaataccaaatttccaaaagaatctatcttcaagaaaggataaaattgatctcttgttcgaggagaacaactttaaacctttcaaatacaacgatttaggtgccttagcatacctgggatccgaaagggccattgcaaccatacgttccggtaagagaacattttacaccggtggtggcttaatgaccttctacttatggagaattttgtacttgtccatgattctatctgcaagatcgagattaaaggtctttttcgactggattaaattagcatttttcaaaagagacttttttaaaggattatag

SEQ ID NO: 65 - DNA, 1542 bp, Artificial Sequence
  source: /note="Description of Artificial Sequence: Synthetic polynucleotide"
atgctatcgaagaatttgtatagtaacaagaggttgctcacctcgacgaatacgctagtcagattcgcttccaccagatccacaggggtggaaaactccggagcaggtcctacatcttttaagaccatgaaagtcattgaccctcagcacagcgacaaaccaaacgtgctgatactgggttcggggtggggagctatttcgtttttaaagcacattgacaccaagaagtacaacgtttccatcatctctcctagaagctatttcttatttacgcctttgttaccttctgcaccagttgggacagtagacgaaaagtcaattattgagcccatcgttaattttgctctcaagaaaaaggggaacgttacctactatgaggcagaagccacctctatcaatcccgacaggaataccgttaccataaaatcattatctgccgttagccagctataccaacctgaaaaccatctagggctgcatcaagcagaacctgctgaaattaagtacgattatttaatcagtgctgtaggtgcggaacctaacacatttggtattcctggggtcactgattacggtcatttcctgaaggaaattcccaactctttggaaataagaagaacttttgccgccaatctagagaaggctaacttattgccaaagggtgatcccgaaagaagaagactactgtccattgtcgtggttggtggtgggcctactggtgtagaggccgctggtgaactacaggattatgttcaccaggacctgagaaagtttctccctgcattggccgaagaagtccaaattcacttggtcgaagctctgcccatcgttttgaatatgtttgagaaaaagctttcatcatacgcgcaatcacatttagaaaacacttcgatcaaagtacatctgagaacggctgtcgccaaagttgaagaaaagcaattgttggcaaagaccaaacacgaagacggtaaaataaccgaagaaactattccatacggtactttgatttgggccacgggtaacaaggcaagaccggtaatcactgaccttttcaagaaaattcctgagcaaaactcgtccaagagaggattggcagtgaatgactttttgcaggtgaaaggcagcaacaacattttcgccattggtgacaatgcatttgctgggttgccaccaaccgcccaagtagcgcaccaagaggccgaatatatcgccaagaattttgataaaatggctcaaataccaaatttccaaaagaatctatcttcaagaaaggataaaattgatctcttgttcgaggagaacaactttaaacctttcaaatacaacgatttaggtgccttagcatacctgggatccgaaagggccattgcaaccatacgttccggtaagagaacattttacaccggtggtggcttaatgaccttctacttatggagaattttgtacttgtccatgattctatctgcaagatcgagattaaaggtctttttcgactggattaaattagcatttttcaaaagagacttttttaaaggattatag

SEQ ID NO: 66 - DNA, 1542 bp, Artificial Sequence
  source: /note="Description of Artificial Sequence: Synthetic polynucleotide"
atgctatcgaagaatttgtatagtaacaagaggttgctcacctcgacgaatacgatggtcagattcgcttccaccagatccacaggggtggaaaactccggagcaggtcctacatcttttaagaccatgaaagtcattgaccctcagcacagcgacaaaccaaacgtgctgatactgggttcggggtggggagctatttcgtttttaaagcacattgacaccaagaagtacaacgtttccatcatctctcctagaagctatttcttatttacgcctttgttaccttctgcaccagttgggacagtagacgaaaagtcaattattgagcccatcgttaattttgctctcaagaaaaaggggaacgttacctactatgaggcagaagccacctctatcaatcccgacaggaataccgttaccataaaatcattatctgccgttagccagctataccaacctgaaaaccatctagggctgcatcaagcagaacctgctgaaattaagtacgattatttaatcagtgctgtaggtgcggaacctaacacatttggtattcctggggtcactgattacggtcatttcctgaaggaaattcccaactctttggaaataagaagaacttttgccgccaatctagagaaggctaacttattgccaaagggtgatcccgaaagaagaagactactgtccattgtcgtggttggtggtgggcctactggtgtagaggccgctggtgaactacaggattatgttcaccaggacctgagaaagtttctccctgcattggccgaagaagtccaaattcacttggtcgaagctctgcccatcgttttgaatatgtttgagaaaaagctttcatcatacgcgcaatcacatttagaaaacacttcgatcaaagtacatctgagaacggctgtcgccaaagttgaagaaaagcaattgttggcaaagaccaaacacgaagacggtaaaataaccgaagaaactattccatacggtactttgatttgggccacgggtaacaaggcaagaccggtaatcactgaccttttcaagaaaattcctgagcaaaactcgtccaagagaggattggcagtgaatgactttttgcaggtgaaaggcagcaacaacattttcgccattggtgacaatgcatttgctgggttgccaccaaccgcccaagtagcgcaccaagaggccgaatatttggccaagaattttgataaaatggctcaaataccaaatttccaaaagaatctatcttcaagaaaggataaaattgatctcttgttcgaggagaacaactttaaacctttcaaatacaacgatttaggtgccttagcatacctgggatccgaaagggccattgcaaccatacgttccggtaagagaacattttacaccggtggtggcttaatgaccttctacttatggagaattttgtacttgtccatgattctatctgcaagatcgagattaaaggtctttttcgactggattaaattagcatttttcaaaagagacttttttaaaggattatag

SEQ ID NO: 67 - DNA, 1542 bp, Artificial Sequence
  source: /note="Description of Artificial Sequence: Synthetic polynucleotide"
atgctatcgaagaatttgtatagtaacaagaggttgctcacctcgacgaatacgctagtcagattcgcttccaccagatccacaggggtggaaaactccggagcaggtcctacatcttttaagaccatgaaagtcattgaccctcagcacagcgacaaaccaaacgtgctgatactgggttcggggtggggagctatttcgtttttaaagcacattgacaccaagaagtacaacgtttccatcatctctcctagaagctatttcttatttacgcctttgttaccttctgcaccagttgggacagtagacgaaaagtcaattattgagcccatcgttaattttgctctcaagaaaaaggggaacgttacctactatgaggcagaagccacctctatcaatcccgacaggaataccgttaccataaaatcattatctgccgttagccagctataccaacctgaaaaccatctagggctgcatcaagcagaacctgctgaaattaagtacgattatttaatcagtgctgtaggtgcggaacctaacacatttggtattcctggggtcactgattacggtcatttcctgaaggaaattcccaactctttggaaataagaagaacttttgccgccaatctagagaaggctaacttattgccaaagggtgatcccgaaagaagaagactactgtccattgtcgtggttggtggtgggcctactggtgtagaggccgctggtgaactacaggattatgttcaccaggacctgagaaagtttctccctgcattggccgaagaagtccaaattcacttggtcgaagctctgcccatcgttttgaatatgtttgagaaaaagctttcatcatacgcgcaatcacatttagaaaacacttcgatcaaagtacatctgagaacggctgtcgccaaagttgaagaaaagcaattgttggcaaagaccaaacacgaagacggtaaaataaccgaagaaactattccatacggtactttgatttgggccacgggtaacaaggcaagaccggtaatcactgaccttttcaagaaaattcctgagcaaaactcgtccaagagaggattggcagtgaatgactttttgcaggtggagggcagcaacaacattttcgccattggtgacaatgcatttgctgggttgccaccaaccgcccaagtagcgcaccaagaggccgaatatttggccaagaattttgataaaatggctcaaataccaaatttccaaaagaatctatcttcaagaaaggataaaattgatctcttgttcgaggagaacaactttaaacctttcaaatacaacgatttaggtgccttagcatacctgggatccgaaagggccattgcaaccatacgttccggtaagagaacattttacaccggtggtggcttaatgaccttctacttatggagaattttgtacttgtccatgattctatctgcaagatcgagattaaaggtctttttcgactggattaaattagcatttttcaaaagagacttttttaaaggattatag

SEQ ID NO: 68 - DNA, 1542 bp, Artificial Sequence
  source: /note="Description of Artificial Sequence: Synthetic polynucleotide"
atgctatcgaagaatttgtatagtaacaagaggttgctcacctcgacgaatacgctagtcagattcgcttccaccagatccacaggggtggaaaactccggagcaggtcctacatcttttaagaccatgaaagtcattgaccctcagcacagcgacaaaccaaacgtgctgatactgggttcggggtggggagctatttcgtttttaaagcacattgacaccaagaagtacaacgtttccatcatctctcctagaagctatttcttatttacgcctttgttaccttctgcaccagttgggacagtagacgaaaagtcaattattgagcccatcgttaattttgctctcaagaaaaaggggaacgttacctactatgaggcagaagccacctctatcaatcccgacaggaataccgttaccataaaatcattatctgccgttagccagctataccaacctgaaaaccatctagggatgcatcaagcagaacctgctgaaattaagtacgattatttaatcagtgctgtaggtgcggaacctaacacatttggtattcctggggtcactgattacggtcatttcctgaaggaaattcccaactctttggaaataagaagaacttttgccgccaatctagagaaggctaacttattgccaaagggtgatcccgaaagaagaagactactgtccattgtcgtggttggtggtgggcctactggtgtagaggccgctggtgaactacaggattatgttcaccaggacctgagaaagtttctccctgcattggccgaagaagtccaaattcacttggtcgaagctctgcccatcgttttgaatatgtttgagaaaaagctttcatcatacgcgcaatcacatttagaaaacacttcgatcaaagtacatctgagaacggctgtcgccaaagttgaagaaaagcaattgttggcaaagaccaaacacgaagacggtaaaataaccgaagaaactattccatacggtactttgatttgggccacgggtaacaaggcaagaccggtaatcactgaccttttcaagaaaattcctgagcaaaactcgtccaagagaggattggcagtgaatgactttttgcaggtgaaaggcagcaacaacattttcgccattggtgacaatgcatttgctgggttgccaccaaccgcccaagtagcgcaccaagaggccgaatatttggccaagaattttgataaaatggctcaaataccaaatttccaaaagaatctatcttcaagaaaggataaaattgatctcttgttcgaggagaacaactttaaacctttcaaatacaacgatttaggtgccttagcatacctgggatccgaaagggccattgcaaccatacgttccggtaagagaacattttacaccggtggtggcttaatgaccttctacttatggagaattttgtacttgtccatgattctatctgcaagatcgagattaaaggtctttttcgactggattaaattagcatttttcaaaagagacttttttaaaggattatag

SEQ ID NO: 69 - DNA, 1542 bp, Artificial Sequence
  source: /note="Description of Artificial Sequence: Synthetic polynucleotide"
atgctatcgaagaatttgtatagtaacaagaggttgctcacctcgacgaatacgctagtcagattcgcttccaccagatccacaggggtggaaaactccggagcaggtcctacatcttttaagaccatgaaagtcattgaccctcagcacagcgacaaaccaaacgtgctgatactgggttcggggtggggagctatttcgtttttaaagcacattgacaccaagaagtacaacgtttccatcatctctcctagaagctatttcttatttacgcctttgttaccttctgcaccagttgggacagtagacgaaaagtcaattattgagcccatcgttaattttgctctcaagaaaaaggggaacgttacctactatgaggcagaagccacctctatcaatcccgacaggaataccgttaccataaaaaacttatctgccgttagccagctataccaacctgaaaaccatctagggctgcatcaagcagaacctgctgaaattaagtacgattatttaatcagtgctgtaggtgcggaacctaacacatttggtattcctggggtcactgattacggtcatttcctgaaggaaattcccaactctttggaaataagaagaacttttgccgccaatctagagaaggctaacttattgccaaagggtgatcccgaaagaagaagactactgtccattgtcgtggttggtggtgggcctactggtgtagaggccgctggtgaactacaggattatgttcaccaggacctgagaaagtttctccctgcattggccgaagaagtccaaattcacttggtcgaagctctgcccatcgttttgaatatgtttgagaaaaagctttcatcatacgcgcaatcacatttagaaaacacttcgatcaaagtacatctgagaacggctgtcgccaaagttgaagaaaagcaattgttggcaaagaccaaacacgaagacggtaaaataaccgaagaaactattccatacggtactttgatttgggccacgggtaacaaggcaagaccggtaatcactgaccttttcaagaaaattcctgagcaaaactcgtccaagagaggattggcagtgaatgactttttgcaggtgaaaggcagcaacaacattttcgccattggtgacaatgcatttgctgggttgccaccaaccgcccaagtagcgcaccaagaggccgaatatttggccaagaattttgataaaatggctcaaataccaaatttccaaaagaatctatcttcaagaaaggataaaattgatctcttgttcgaggagaacaactttaaacctttcaaatacaacgatttaggtgccttagcatacctgggatccgaaagggccattgcaaccatacgttccggtaagagaacattttacaccggtggtggcttaatgaccttctacttatggagaattttgtacttgtccatgattctatctgcaagatcgagattaaaggtctttttcgactggattaaattagcatttttcaaaagagacttttttaaaggattatag

SEQ ID NO: 70 - DNA, 1542 bp, Artificial Sequence
  source: /note="Description of Artificial Sequence: Synthetic polynucleotide"
atgctatcgaagaatttgtatagtaacaagaggttgctcacctcgacgaatacgctagtcagattcgcttccaccagatccacaggggtggaaaactccggagcaggtcctacatcttttaagaccatgaaagtcattgaccctcagcacagcgacaaaccaaacgtgctgatactgggttcggggtggggagctatttcgtttttaaagcacattgacaccaagaagtacaacgtttccatcatctctcctagaagctatttcttatttacgcctttgttaccttctgcaccagttgggacagtagacgaaaagtcaattattgagcccatcgttaattttgctctcaagaaaaaggggaacgttacctactatgaggcagaagccacctctatcaatcccgacaggaataccgttaccataaaatcattatctgccgttagccagctataccaacctgaaaaccatctagggctgcatcaagcagaacctgctgaaattaagtacgattatttaatcagtgctgtaggtgcggaacctaacacatttggtattcctggggtcactgattacggtcatttcttcaaggaaattcccaactctttggaaataagaagaacttttgccgccaatctagagaaggctaacttattgccaaagggtgatcccgaaagaagaagactactgtccattgtcgtggttggtggtgggcctactggtgtagaggccgctggtgaactacaggattatgttcaccaggacctgagaaagtttctccctgcattggccgaagaagtccaaattcacttggtcgaagctctgcccatcgttttgaatatgtttgagaaaaagctttcatcatacgcgcaatcacatttagaaaacacttcgatcaaagtacatctgagaacggctgtcgccaaagttgaagaaaagcaattgttggcaaagaccaaacacgaagacggtaaaataaccgaagaaactattccatacggtactttgatttgggccacgggtaacaaggcaagaccggtaatcactgaccttttcaagaaaattcctgagcaaaactcgtccaagagaggattggcagtgaatgactttttgcaggtgaaaggcagcaacaacattttcgccattggtgacaatgcatttgctgggttgccaccaaccgcccaagtagcgcaccaagaggccgaatatttggccaagaattttgataaaatggctcaaataccaaatttccaaaagaatctatcttcaagaaaggataaaattgatctcttgttcgaggagaacaactttaaacctttcaaatacaacgatttaggtgccttagcatacctgggatccgaaagggccattgcaaccatacgttccggtaagagaacattttacaccggtggtggcttaatgaccttctacttatggagaattttgtacttgtccatgattctatctgcaagatcgagattaaaggtctttttcgactggattaaattagcatttttcaaaagagacttttttaaaggattatag

SEQ ID NO: 71 - DNA, 1542 bp, Artificial Sequence
  source: /note="Description of Artificial Sequence: Synthetic polynucleotide"
atgctatcgaagaatttgtatagtaacaagaggttgctcacctcgacgaatacgctagtcagattcgcttccaccagatccacaggggtggaaaactccggagcaggtcctacatcttttaagaccatgaaagtcattgaccctcagcacagcgacaaaccaaacgtgctgatactgggttcggggtggggagctatttcgtttttaaagcacattgacaccaagaagtacaacgtttccatcatctctcctagaagctatttcttatttacgcctttgttaccttctgcaccagttgggacagtagacgaaaagtcaattattgagcccatcgttaattttgctctcaagaaaaaggggaacgttacctactatgaggcagaagccacctctatcaatcccgacaggaataccgttaccataaaatcattatctgccgttagccagctataccaacctgaaaaccatctagggctgcatcaagcagaacctgctgaaattaagtacgattatttaatcagtgctgtaggtgcggaacctaacacatttggtattcctggggtcactgattacggtcatttcctgaaggaaattcccaactctttggaaataagaagaacttttgccgccaatctagagaaggctaacttattgccaaagggtgatcccgaaagaagaagactactgtccattgtcgtggttggtggtgggcctactggtgtagaggccgctggtgaactacaggattatgttcaccaggacctgagaaagtttctccctgcattggccgaagaagtccaaattcacttggtcgaagctctgcccatcgttttgaatatgtttgagaaaaagctttcatcatacgcgcaatcacatttagaaaacacttcgatcaaagtacatctgagaacggctgtcgccaaagttgaagaaaagcaattgttggcaaagaccaaacacgaagacggtaaaataaccgaagaaactattccatacggtactttgatttgggccacgggtaacaaggcaagaccggtaatcactgaccttttcaagaaaattcctgagcaaaactcgtccaagagaggattggcagtgaatgactttttgcaggtgaaaggcagcaacaacattttcgccattggtgacaatgcatttgctgggttgccaccaaccgcccaagtagcgcaccaagaggccgaatatttggccaagaattttgataaaatggctcaaataccaaatttccaaaagaatctatcttcaagaaaggataaaattgatctcttgttcgaggagaacaactttaaacctttcaaatacaacgatttaggtgccttagcatacctgggatccgaaagggccattgcaaccatacgttccggtaagagaacattttacaccggtggtggcttaatgaccttctacttatggagaattttgtacatgtccatgattctatctgcaagatcgagattaaaggtctttttcgactggattaaattagcatttttcaaaagagacttttttaaaggattatag

SEQ ID NO: 72 - DNA, 1542 bp, Artificial Sequence
  source: /note="Description of Artificial Sequence: Synthetic polynucleotide"
atgctatcgaagaatttgtatagtaacaagaggttgctcacctcgacgaatacgctagtcagattcgcttccaccagatccacaggggtggaaaactccggagcaggtcctacatcttttaagaccatgaaagtcattgaccctcagcacagcgacaaaccaaacgtgctgatactgggttcggggtggggagctatttcgtttttaaagcacattgacaccaagaagtacaacgtttccatcatctctcctagaagctatttcttatttacgcctttgttaccttctgcaccagttgggacagtagacgaaaagtcaattattgagcccatcgttaattttgctctcaagaaaaaggggaacgttacctactatgaggcagaagccacctctatcaatcccgacaggaataccgttaccataaaatcattatctgccgttagccagctataccaacctgaaaaccatctagggctgcatcaagcagaacctgctgaaattaagtacgattatttaatcagtgctgtaggtgcggaacctaacacatttggtattcctggggtcactgattacggtcatttcctggaggaaattcccaactctttggaaataagaagaacttttgccgccaatctagagaaggctaacttattgccaaagggtgatcccgaaagaagaagactactgtccattgtcgtggttggtggtgggcctactggtgtagaggccgctggtgaactacaggattatgttcaccaggacctgagaaagtttctccctgcattggccgaagaagtccaaattcacttggtcgaagctctgcccatcgttttgaatatgtttgagaaaaagctttcatcatacgcgcaatcacatttagaaaacacttcgatcaaagtacatctgagaacggctgtcgccaaagttgaagaaaagcaattgttggcaaagaccaaacacgaagacggtaaaataaccgaagaaactattccatacggtactttgatttgggccacgggtaacaaggcaagaccggtaatcactgaccttttcaagaaaattcctgagcaaaactcgtccaagagaggattggcagtgaatgactttttgcaggtgaaaggcagcaacaacattttcgccattggtgacaatgcatttgctgggttgccaccaaccgcccaagtagcgcaccaagaggccgaatatttggccaagaattttgataaaatggctcaaataccaaatttccaaaagaatctatcttcaagaaaggataaaattgatctcttgttcgaggagaacaactttaaacctttcaaatacaacgatttaggtgccttagcatacctgggatccgaaagggccattgcaaccatacgttccggtaagagaacattttacaccggtggtggcttaatgaccttctacttatggagaattttgtacttgtccatgattctatctgcaagatcgagattaaaggtctttttcgactggattaaattagcatttttcaaaagagacttttttaaaggattatag

SEQ ID NO: 73 - DNA, 1542 bp, Artificial Sequence
  source: /note="Description of Artificial Sequence: Synthetic polynucleotide"
atgctatcgaagaatttgtatagtaacaagaggttgctcacctcgacgaatacgctagtcagattcgcttccaccagatccacaggggtggaaaactccggagcaggtcctacatcttttaagaccatgaaagtcattgaccctcagcacagcgacaaaccaaacgtgctgatactgggttcggggtggggagctatttcgtttttaaagcacattgacaccaagaagtacaacgtttccatcatctctcctagaagctatttcttatttacgcctttgttaccttctgcaccagttgggacagtagacgaaaagtcaattattgagcccatcgttaattttgctctcaagaaaaaggggaacgttacctactatgaggcagaagccacctctatcaatcccgacaggaataccgttaccataaaatcattatctgccgttagccagctataccaacctgaaaaccatctagggctgcatcaagcagaacctgctgaaattaagtacgattatttaatcagtgctgtaggtgcggaacctaacacatttggtattcctggggtcactgattacggtcatttcctgaaggaaattcccaactctttggaaataagaagaacttttgccgccaatctagagaaggctaacttattgccaaagggtgatcccgaaagaagaagactactgtccattgtcgtggttggtggtgggcctactggtgtagaggccgctggtgaactacaggattatgttcaccaggacctgagaaagtttctccctgcattggccgaagaagtccaaattcacttggtcgaagctctgcccatcgttttgaatatgtttgagaaaaagctttcatcatacgcgcaatcacatttagaaaacacttcgatcaaagtacatctgagaacggctgtcgccaaagttgaagaaaagcaattgttggcaaagaccaaacacgaagacggtaaaataaccgaagaaactattccatacggtactttgatttgggccacgggtaacaaggcaagaccggtaatcactgaccttttcaagaaaattcctgagcaaaactcgtccaagagaggattggcagtgaatgactttttgcaggtgaaaggcagcaacaacattttcgccattggtgacaatgcatttagcgggttgccaccaaccgcccaagtagcgcaccaagaggccgaatatttggccaagaattttgataaaatggctcaaataccaaatttccaaaagaatctatcttcaagaaaggataaaattgatctcttgttcgaggagaacaactttaaacctttcaaatacaacgatttaggtgccttagcatacctgggatccgaaagggccattgcaaccatacgttccggtaagagaacattttacaccggtggtggcttaatgaccttctacttatggagaattttgtacttgtccatgattctatctgcaagatcgagattaaaggtctttttcgactggattaaattagcatttttcaaaagagacttttttaaaggattatag

SEQ ID NO: 74 - DNA, 1542 bp, Artificial Sequence
  source: /note="Description of Artificial Sequence: Synthetic polynucleotide"
atgctatcgaagaatttgtatagtaacaagaggttgctcacctcgacgaatacgctagtcagattcgcttccaccagatccacaggggtggaaaactccggagcaggtcctacatcttttaagaccatgaaagtcattgaccctcagcacagcgacaaaccaaacgtgctgatactgggttcggggtggggagctatttcgtttttaaagcacattgacaccaagaagtacaacgtttccatcatctctcctagaagctatttcttatttacgcctttgttaccttctgcaccagttgggacagtagacgaaaagtcaattattgagcccatcgttaattttgctctcaagaaaaaggggaacgttacctactatgaggcagaagccacctctatcaatcccgacaggaataccgttaccataaaatcattatctgccgttagccagctataccaacctgaaaaccatctagggctgcatcaagcagaacctgctgaaattaagtacgattatttaatcagtgctgtaggtgcggaacctaacacatttggtattcctggggtcactgattacggtcatttcctgaaggaaattcccaactctttggaaataagaagaacttttgccgccaatctagagaaggctaacttattgccaaagggtgatcccgaaagaagaagactactgtccattgtcgtggttggtggtgggcctactggtgtagaggccgctggtgaactacaggattatgttcaccaggacctgagaaagtttttccctgcattggccgaagaagtccaaattcacttggtcgaagctctgcccatcgttttgaatatgtttgagaaaaagctttcatcatacgcgcaatcacatttagaaaacacttcgatcaaagtacatctgagaacggctgtcgccaaagttgaagaaaagcaattgttggcaaagaccaaacacgaagacggtaaaataaccgaagaaactattccatacggtactttgatttgggccacgggtaacaaggcaagaccggtaatcactgaccttttcaagaaaattcctgagcaaaactcgtccaagagaggattggcagtgaatgactttttgcaggtgaaaggcagcaacaacattttcgccattggtgacaatgcatttgctgggttgccaccaaccgcccaagtagcgcaccaagaggccgaatatttggccaagaattttgataaaatggctcaaataccaaatttccaaaagaatctatcttcaagaaaggataaaattgatctcttgttcgaggagaacaactttaaacctttcaaatacaacgatttaggtgccttagcatacctgggatccgaaagggccattgcaaccatacgttccggtaagagaacattttacaccggtggtggcttaatgaccttctacttatggagaattttgtacttgtccatgattctatctgcaagatcgagattaaaggtctttttcgactggattaaattagcatttttcaaaagagacttttttaaaggattatag

SEQ ID NO: 75 - DNA, 1542 bp, Artificial Sequence
  source: /note="Description of Artificial Sequence: Synthetic polynucleotide"
atgctgtcgaagaatctgtatagtaacaagcggttgctcacctcgacgaataccctagtgagattcgcttccaccagatccacaggggtggaaaactccggagcaggccctacatcttttaagaccatgaaagtcattgaccctcagcacagcgacaaacccaacgtgctgatactgggttcgggctggggagccatttcgtttctgaagcacattgacaccaagaagtacaacgtctccatcatctctcccagaagctatttcttattcacgcccttgttacccagcgcaccagtggggacagtagacgagaagtccattattgagcccatcgttaattttgctctcaagaaaaaggggaacgtcacctactatgaggcagaagccacctctatcaatcccgaccggaataccgttaccataaaatcactgtctgccgtgagccagctataccagcctgagaaccatctaggcctgcatcaagccgaacccgctgagattaagtacgattacctgatcagtgccgtgggcgcggaacccaacacatttggaatccctggcgtcaccgactacggtcacttcctgaaagaaattcccaactctttggaaatccggagaacttttgccgccaatctagagaaggctaacctgctgcctaagggtgatcccgaaagaagaagactgctgtccattgtcgtggttggtggagggcctacaggtgtagaggctgctggcgagctacaggattatgtgcaccaggacctgcggaagtttctccctgcattggccgaggaagtccagattcacttggtcgaagctctgcccatcgttttgaatatgtttgagaaaaagctgtcatcatacgcgcagagccatttagaaaacacttcgatcaaggtgcatctgagaaccgctgtcgccaaagtggaagaaaagcaattgttggccaagaccaagcacgaagacggtaaaataaccgaagaaactattccatacggtactttgatttgggccaccggtaacaaggcaagacccgtaatcaccgaccttttcaagaaaattcctgagcaaaactcgtccaagcggggcctggcagtgaatgactttttgcaggtgaaaggcagcaacaacattttcgccattggtgacaatgcatttgctgggttgccacctacagcccaagtagcgcaccaagaggccgaatatctggccaagaattttgataaaatggctcaaataccaaatttccagaagaatctatcctcacggaaggataaaatcgatctgctgttcgaggagaacaacttcaagcccttcaagtacaacgatctgggtgccctggcctacctgggatccgaaagggccattgcaaccatccgtagcggcaagagaaccttttacaccggtggtggcttaatgaccttctacctgtggagaattttgtacttgagcatgattctatctgcacgcagcagattaaaggtgttcttcgactggattaaaatggcctttttcaaaagagacttttttaaaggattatag

SEQ ID NO: 76 - DNA, 1542 bp, Artificial Sequence
  source: /note="Description of Artificial Sequence: Synthetic polynucleotide"
atgctatcgaagaatttgtacagcaacaagaggttgctcacctcgacgaatacgctcgtcagattcgcttccaccagatccaccggcgtcgaaaacagcggggctggtcctacatctttcaagaccatgaaagtcattgaccctcagcacagcgacaagccaaacgtgctgatactgggttcggggtggggagctatcagctttctgaagcacatcgacaccaagaagtacaacgtttccatcatctctcctagaagctacttcctgttcacgcctttgttaccttctgcacctgttgggacagtagacgagaagtcaattattgagcccatcgttaatttcgctctcaagaaaaaggggaacgttacctactatgaggcagaagccacctctatcaaccccgaccggaataccgttaccatcaaatcattatctgccgtgagccagctataccaacctgaaaaccatctagggctgcatcaggccgaacccgccgaaattaagtacgactatttaatcagcgctgtgggtgccgagcccaacacatttggtattcctggggtcactgattacggccatttcctggaggaaatccccaactctctggaaatcagaagaacttttgccgccaatctagagaaggccaacctgttgccaaagggtgatcccgaaagaagaagactactgtccatcgtcgtcgtgggtggtgggcctacaggcgtagaagctgctggcgagctgcaggactatgttcaccaggacctgagaaagtttctgcccgcactggccgaggaagtccaaattcacttggtcgaagccctgcccatcgttttgaacatgtttgagaagaagcttagcagctacgcgcaatcacatttagaaaacacttccatcaaagtgcatctgagaacggccgtcgccaaagttgaagaaaagcagttgttggcaaagaccaaacacgaagacggtaaaataaccgaggaaactatcccatacggtactctgatttgggccacgggtaacaaggcaagacccgtaatcactgaccttttcaagaaaattcctgagcagaactcgagcaagcggggattggccgtgaacgacttcttgcaggtcaaaggcagcaacaacattttcgccatcggcgacaatgcctttgctgggctgccacctaccgcccaggtagcgcaccaagaggccgagtatttggccaagaatttcgataaaatggctcaaataccaaatttccagaagaatctatcctccagaaaggataaaattgacctcttgttcgaggagaacaactttaaacctttcaaatacaacgatctgggcgccttagcatacctgggatccgaaagggccattgcaaccataagatccggtaagagaacattctacaccggcggtggcttaatgaccttctacttatggagaattttgtacttgtccatgatcctatctgcaagatcgagattaaaggtctttttcgactggatcaaactggcctttttcaagagagacttttttaagggcttatag

SEQ ID NO: 77 - DNA, 1542 bp, Artificial Sequence
  source: /note="Description of Artificial Sequence: Synthetic polynucleotide"
atgctatcgaagaatctgtacagtaacaagaggttgctcacctcgacgaacacgctagtcagattcgcctccaccagatccacaggcgtggaaaacagcggagctggtcctacatcttttaagaccatgaaagtcattgacccccagcacagcgacaagccaaacgtgctgatactgggttctggctggggcgccatttcgtttttaaagcacattgacaccaagaagtacaacgttagcatcatctctcctagaagctatttcctgtttacgcccttgctgcctagcgcacctgttgggacagtagacgaaaagtcaattatcgagcccatcgttaattttgctctcaagaaaaaggggaacgttacctactatgaggcagaagccacctctatcaatcccgaccggaataccgttaccatcaaaagcttatctgccgttagccagctataccaacccgagaaccatctaggcctgcatcaagcagagcccgctgaaattaagtacgattacttaatcagtgccgtgggcgcggagcccaacacctttggtattcctggcgtcactgactacggtcatttcctgaaggaaattcccaactctttggaaataagacggacctttgccgccaacctagagaaggctaacttattgccaaagggtgaccccgaacggagaaggctgctgtccatcgtcgtggttggtggtgggcccacaggtgtggaagctgctggtgagctacaggattatgtgcaccaggacctgagaaagtttctgcctgcattggccgaggaagtccaaattcacttggtcgaagccctgcccatcgtgttgaatatgttcgagaaaaagcttagctcatacgcgcaatcacatctggaaaacacttcgatcaaagtgcatctgagaacggctgtcgccaaggttgaagaaaagcaattgttggcaaagaccaagcacgaagacggtaaaattaccgaagaaaccattccatacggtaccctgatttgggccaccggcaacaaggcaagacccgtgatcactgaccttttcaagaaaattcctgagcaaaacagctccaagagaggactggcagtgaacgactttctgcaggtcaaaggcagcaacaacatcttcgccattggtgacaatgcctttgctggcttgccacctaccgcccaagtggcgcaccaagaggccgaatacatcgccaagaattttgataaaatggctcaaataccaaatttccaaaagaacctatcttcaagaaaggataagattgatctcttgttcgaggaaaacaactttaaacctttcaaatacaacgacctgggtgccttagcatacctgggatccgaaagggccattgcaaccataagaagcggtaagagaacattctacaccggtggaggcctgatgaccttctacttatggagaatcttgtacttgtccatgattctaagcgccagatcgagactgaaggtctttttcgactggatcaaattagccttcttcaaaagagactttttcaaaggattatag

SEQ ID NO: 78 - DNA, 1542 bp, Artificial Sequence
  source: /note="Description of Artificial Sequence: Synthetic polynucleotide"
atgctatcgaagaatttgtatagtaacaagcggttgctcacctcgacgaatacgctagtcagattcgcctccaccagatccaccggcgtggaaaactccggggcaggtcccacatctttcaagaccatgaaagtcattgaccctcagcacagcgacaaaccaaacgtgctgatcctgggctctggctggggagccattagctttctgaagcacattgacaccaagaagtacaacgtctccatcatctctcctagaagctatttcctgtttacgcctttgttacctagcgcccctgtggggacagtagacgaaaagtcaattatcgagcccatcgttaacttcgccctcaagaaaaaggggaacgtcacctactacgaggcagaagccacctctatcaatcccgaccggaataccgtgaccataaaatcattatctgccgttagccagctataccagcctgaaaaccatctagggctgcatcaagccgaacctgctgagattaagtacgattatttaatcagcgctgtaggcgcggaacccaacacatttggtattcctggcgtcactgattacggtcatttcctgaaggaaattcccaactctctggaaataagacggacttttgccgccaacctggagaaggccaacttactgcctaagggcgaccccgaaagaagaagactactgtccattgtggtcgttggtggagggcccactggtgtggaggccgctggtgagctacaggactatgttcaccaggacctgagaaagttcctccccgcactggccgaggaagtccaaattcacttggtcgaagctctgcccatcgttttgaatatgtttgagaagaagctgtcatcatacgcccaatcacacttagaaaacacttcgatcaaagtgcatctgagaaccgctgtcgccaaagttgaagaaaagcaattgctggcaaagaccaaacacgaagacggtaaaattaccgaggaaaccattccatacggcaccttgatttgggccacgggcaacaaggcaagaccggtaatcactgaccttttcaagaaaattcctgagcagaactcgtccaagagaggcttggcagtgaatgactttttgcaggtgaaaggcagcaacaacatcttcgccatcggcgacaatgcatttgctgggctgcctccaaccgcccaagtagcgcaccaggaggccgaatatttggccaagaactttgataaaatggctcagatacccaatttccaaaagaatctatcttccagaaaggataagattgatctgctgttcgaggagaacaactttaaacctttcaagtacaacgacttaggcgccttagcctacctgggatccgaaagagccattgccaccatccgttccggtaagagaaccttctacaccggtggaggcctgatgaccttctacttatggcggattttgtacttgtccatgattctatctgcaagaagcagattaaaggtctttttcgactggatcaaattagcatttttcaagagagacttctttgagggattatga

SEQ ID NO: 79 - DNA, 1542 bp, Artificial Sequence
  source: /note="Description of Artificial Sequence: Synthetic polynucleotide"
atgctatcgaagaatctgtatagcaaccggaggttgctcacctcgacgaatacgctagtcagattcgctagcaccagatccacaggcgtggaaaactccggggctggtcctaccagctttaagaccatgaaagtcatcgaccctcagcacagcgacaaaccaaacgtgctgatactgggttcggggtggggagctatttcgtttttaaagcacatcgacaccaagaagtacaacgtttccatcatctctcccagaagctatttcttatttacgcctctgttaccttctgcaccagttgggacagtggacgaaaagtccattattgagcccatcgtgaatttcgccctgaagaaaaagggcaacgttacctactatgaggcagaagccaccagcatcaatcccgacaggaacaccgttaccataaaaagcttatctgccgtgagccagctataccagcctgaaaaccatctagggctgcatcaagcagaacctgctgaaattaagtacgattatttaatcagtgccgtaggtgccgaacccaacacatttggtattcctggggtgactgattacggtcacttcctgaaggagatccccaacagcctggaaatacggcggacttttgccgccaatctagagaaggctaacttattgccaaagggcgaccccgagagaagaagactactgtccattgtcgtcgttggcggagggcccactggtgtagaggccgctggtgaactacaggattacgttcaccaggacctgagaaagttcctccccgcactggccgaggaagtgcaaattcacctggtcgaagctctgcccatcgttctgaatatgtttgagaagaagctttcatcatacgcccaaagccatctggaaaacacttcgatcaaggtacatctgagaacggccgtggccaaagtggaagagaagcaattgctggcaaagaccaaacacgaagacggcaaaataaccgaagaaaccattccatacggcactttgatttgggccacgggtaacaaggcaagaccggtaatcactgacctgttcaagaaaattcctgagcaaaacagctccaagagaggactggccgtgaacgactttttgcaggtgaaaggcagcaacaacatcttcgccattggtgacaacgcctttgccgggctgccaccaacagcccaggtagcgcaccaagaggccgaatacctggccaagaacttcgataaaatggcccaaataccaaatttccaaaagaatctgtcttcacggaaggataagatcgacctcctgttcgaggagaacaactttaaacctttcaaatacaacgatttaggtgccttagcatacctgggatccgaaagggccattgcaaccataagatccggtaagagaaccttttacaccggtggtggcttaatgaccttctacttatggcggattttgtacttgtccatgattctgagcgcccgcagcagactgaaggtctttttcgactggatcaagttagcctttttcaaaagagacttttttaagggattatga

SEQ ID NO: 80 - DNA, 1542 bp, Artificial Sequence
  source: /note="Description of Artificial Sequence: Synthetic polynucleotide"
atgctatcgaagaatttgtatagtaacaagaggctgctcacctcgaccaatacgctagtcagattcgcttccaccagatccacaggggtggaaaacagcggggctggccccaccagctttaagaccatgaaagtcattgaccctcagcacagcgacaaaccaaacgtgctgatactgggttctgggtggggagctatctcgtttttaaagcacattgacaccaagaagtacaacgtttccatcatctctcctagaagctatttcttattcacccccttgttacctagcgcaccagttgggaccgtagacgaaaagtcaattatcgagcccatcgttaatttcgctctcaagaaaaaggggaacgtcacctactacgaggcagaggccacctctatcaaccccgacaggaacaccgttaccataaaatcactgtctgccgtgtcccagctgtaccaacccgaaaaccatctagggctgcatcaagcagagcctgctgagattaagtacgattacctgatcagtgctgtaggtgcggaacccaacacatttggtattcccggggtgactgattacggtcatttcctgaaagagatccccaactctctggaaataagaagaacttttgccgccaatctggaaaaggccaacttattgcctaagggcgatcccgaaagaagaagactgctgtccattgtggtggttggtggtgggcctactggcgtggaggccgctggtgaactgcaggattatgtgcaccaggacctgagaaagtttctccccgcattggccgaggaagtgcaaattcacttggtggaagccctgcccatcgttctgaatatgttcgagaaaaagctttcatcatacgcccaatcacatttagaaaacacttccatcaaagtacatctgagaacggccgtcgccaaagtggaagaaaagcagttgctggcaaagaccaaacacgaagacggcaagataaccgaagaaactattccatacggcactttgatttgggccacgggcaacaaggcaagaccggtgatcaccgaccttttcaagaaaattcctgagcaaaacagcagcaagagaggcttggcagtgaatgactttttgcaggtcaaaggcagcaacaacattttcgccatcggcgacaatgcatttgctggcctgccaccaaccgcccaagtagcgcaccaggaggccgagtatttggccaagaattttgataaaatggcccagatacccaatttccaaaagaacctatcttccagaaaggataagatcgatctcttgttcgaggagaacaactttaaacctttcaaatacaacgatctgggcgccttagcatacctgggatccgaaagggccattgccaccatccgttccggcaagcggacattttacaccggcggtggcttaatgaccttctacttatggagaatcttgtacttgagcatgattctaagcgcaagatcgagattaaaggtcttcttcgactggattaaattagcatttttcaaaagagactttttcgagggactgtag

SEQ ID NO: 81 - DNA, 1542 bp, Artificial Sequence
  source: /note="Description of Artificial Sequence: Synthetic polynucleotide"
atgctgtcgaagaacttgtatagcaacaagaggctgctgacctcgacgaacacgctcgtcagattcgccagcaccagatccacaggcgtggaaaacagcggggctggtcccacatcttttaagaccatgaaagtcattgaccctcagcacagcgacaagccaaacgtgctgatcctgggttcggggtggggcgctatctcgtttttaaagcacattgacaccaagaagtacaacgtctccatcatcagccccagaaagtatttcctgtttacgcctttgttaccttctgcacctgttgggaccgtagacgagaagtccattattgagcccatcgtgaatttcgctctgaagaaaaaggggaacgttacctactatgaggccgaagccacctctatcaatcccgacaggaacaccgttaccatcaaatcattatctgccgttagccagctataccaacccgaaaaccacctggggctgcatcaagcagagcctgccgaaattaagtacgattacttaatcagcgccgtaggtgccgaacctaacacctttggtattcctggcgtcaccgattacggtcatttcctgaaggaaattcccaactctttggaaataagacggactttcgccgccaatctagagaaggccaacttattgcctaagggtgatcccgagagaagaagactgctgtccattgtcgtcgttggtggtgggcctactggtgtagaggccgctggtgagctacaggattatgttcaccaggacctgagaaagtttctccccgccttggccgaagaagtgcagattcacctggtcgaagctctgcccatcgttttgaatatgtttgagaaaaagctttcaagctacgcgcaaagccatctggaaaacacttcgatcaaagtgcatctgagaaccgctgtcgccaaagttgaagaaaagcaattgctggccaagaccaaacacgaagacggcaagataaccgaagaaactatcccatacggtactttgatttgggccacgggtaacaaggccagaccggtaatcactgaccttttcaagaaaattcctgagcagaactcgtccaagcggggattggcagtgaatgactttttgcaggtgaaaggcagcaacaacattttcgccatcggtgacaatgcctttgccgggttgcctcctaccgcccaagtggcgcaccaagaggccgaatacctggccaagaatttcgataaaatggctcaaataccaaatttccagaagaatctgtcctcccggaaggataaaattgatctgctgttcgaggaaaacaactttaaacctttcaaatacaacgacttaggtgccttagcatacctgggaagcgaaagggccattgcaaccatacgttccggcaagagaacattttacaccggtggtggcctgatgaccttctacctgtggcggattttgtacctgtccatgatcctatctgccagatcgagattaaaggtctttttcgactggattaaattagcattcttcaaaagagacttttttaaaggcctgtga

SEQ ID NO: 82 - DNA, 1542 bp, Artificial Sequence
  source: /note="Description of Artificial Sequence: Synthetic polynucleotide"
atgctaagcaagaacttgtatagtaacaagaggttgctgacctcgaccaatacgctagtcagattcgctagcaccagatccaccggggtggaaaactccggagcaggccctacaagctttaagaccatgaaagtcattgaccctcagcacagcgacaaaccaaacgtgctgatactgggttctgggtggggagctatctcgtttttaaagcacattgacaccaagaagtacaacgttagcatcatctctcctagaagctatttcttattcacgcctttgttaccttctgccccagttggaacagtggacgaaaagtccattattgagcccatcgtgaattttgctctcaagaaaaagggcaacgttacctactacgaggcagaagccaccagcatcaaccccgacaggaataccgttaccatcaagtcactgtctgccgttagccagctataccaacctgagaaccatctaggcctgcaccaagccgaacctgccgaaattaagtacgattatttaatcagtgctgtaggtgccgaacctaacacatttggaattcctggggtcactgattacggtcacttcctgaaggagatccccaacagcctggaaatcagaagaaccttcgccgccaatctagagaaggccaacttactgccaaagggtgatcccgaaagaagaagactactgtccattgtggtcgtgggcggtgggcctactggtgtagaggccgctggtgaactacaggattacgttcaccaggacctgcggaagttcctccctgcactggccgaagaagtccaaattcacttggtggaagctctgcccatcgttttgaatatgtttgagaaaaagctttcaagctacgcgcaatcacatctggaaaacacttccatcaaggtacatctgagaacggctgtcgccaaagttgaagagaagcagctgttggcaaagaccaaacacgaagacggcaaaataaccgaagaaactattccctacggcactctgatttgggccacgggtaacaaggcaagaccggtaatcactgaccttttcaagaaaattcccgagcaaaacagctccaagagaggattggcagtgaatgactttttgcaggtgaaaggcagcaacaacatcttcgccattggtgacaacgcatttgccggcttgccacctacagcccaagtagcccaccaggaagccgagtacatcgccaagaactttgataaaatggctcagataccaaatttccagaagaacctatcttccagaaaggataagattgacctcttgttcgaggaaaacaactttaaacccttcaaatacaacgatttaggtgccttagcatacctgggctccgaaagagccattgccaccataagatccggcaagagaaccttctacaccggtggaggcctgatgaccttctacttatggcggattttgtacttgtccatgatcctatctgcaagaagcagattaaaggtgtttttcgactggattaaactggcatttttcaaaagggactttttcaaaggattatag

SEQ ID NO: 83 - DNA, 1542 bp, Artificial Sequence
  source: /note="Description of Artificial Sequence: Synthetic polynucleotide"
atgctatcgaagaacttgtatagtaacaagcggttgctcacctcgacgaacacgctagtgcgcttcgcctccaccagatccacaggggtcgaaaactccggagctggccctacatcttttaagaccatgaaagtcattgaccctcagcacagcgacaaacccaacgtgctgatcctgggttcgggctggggagctatttcgtttttaaagcacattgacaccaagaagtacaacgtttccatcatctctcctagaagctatttcttacacacgcctttgttacctagcgcaccagtgggaaccgtagacgagaagtcaattatcgagcccatcgttaactttgctctcaagaaaaaggggaacgttacctactatgaggcagaagccacctctatcaatcccgaccggaataccgtgaccataaagagcttatctgccgttagccagctgtaccaacctgaaaaccatctggggctgcaccaagcagaacccgctgaaattaagtacgactacttaatcagtgccgtaggcgccgagcccaacacatttggtattcctggcgtcactgattacggccatttcctgaaagaaattcccaactctctggaaatacggagaacttttgccgccaatctagagaaggccaacttattgcctaagggtgaccccgaaagaagaagactgctgagcattgtcgtggttggtggtggccccactggtgtggaggctgctggtgaactacaggactacgttcaccaggacctgagaaagttcctgcctgcactggccgaagaagtgcaaattcacttggtggaagctctgcccatcgttttgaatatgttcgagaagaagctttcatcatacgcccaatcacatttagaaaacacttccatcaaggtacacctgagaaccgctgtggccaaagttgaagagaagcaactgttggcaaagaccaaacacgaagacggtaaaataaccgaggaaactattccatacggtaccctgatttgggccacgggcaacaaggcaagaccggtaatcaccgaccttttcaagaaaattcctgagcaaaactcgtccaagagaggattggcagtgaatgacttcttgcaggtgaaaggcagcaacaacatcttcgccatcggcgacaatgcctttgctgggctgcctccaaccgcccaagtagcccaccaagaggccgagtacttggccaagaatttcgataaaatggctcaaataccaaatttccaaaagaatctatcttccagaaaggataaaattgacctcttgttcgaggaaaacaactttaaacctttcaaatacaacgatttaggtgccttagcctacctgggaagcgaaagagccattgccaccataagaagcggtaagagaacattctacaccggtggtggcttaatgaccttctacttatggagaattctgtacctgtccatgattctatctgcaagatcgagactgaaggtgtttttcgactggattaagttagcctttttcaagagagacttctttaaaggcttatag

SEQ ID NO: 84 - DNA, 1542 bp, Artificial Sequence
  source: /note="Description of Artificial Sequence: Synthetic polynucleotide"
atgctgagcaagaatttgtacagcaacaagaggttgctcaccagcaccaacacgctcgtgagattcgcctccaccagatccacaggcgtcgaaaactccggagctggccccacaagcttcaagaccatgaaagtcattgaccctcagcacagcgacaagcccaacgtgctgatactgggttcgggctggggagctatctcgtttttaaagcacatcgacaccaagaagtacaacgtttccatcatctctcccagaaagtatttcctgtttacccccctgttaccctctgcacctgttgggaccgtggacgaaaagtccattatcgagcccatcgtgaattttgctctgaagaaaaagggcaacgtcacctactatgaggcagaagccacctctatcaatcccgaccggaataccgttaccatcaaaagcttatctgccgttagccagctataccaacctgaaaaccatctggggctgcatcaagcagaacctgctgaaattaagtacgattatttaatcagtgctgtaggcgcggaacctaacacatttggaattcctggggtcactgattacggtcatttcctgaaggaaattcccaactctttggaaatcagaagaacttttgccgccaacctggagaaggctaacttattgccaaagggtgatcccgaaagaagaaggctactgagcattgtcgtggtgggtggtgggcccacaggtgtggaggccgctggtgaactgcaggactatgtgcaccaggacctgcggaagttcctccctgccctggccgaagaagtccagattcacttggtcgaagctctgcccatcgttttgaacatgtttgagaaaaagctttcaagctacgcgcaaagccatctggaaaacacttccatcaaagtacacctgagaacggccgtggccaaggttgaagaaaagcaattgttggcaaagaccaaacacgaagacggtaaaataaccgaagaaactattccctacggtactttgatttgggccacgggtaacaaggcaagaccggtaatcactgaccttttcaagaaaattcctgagcaaaactcgtccaagagaggcttggcagtgaatgactttttgcaggtcaaaggcagcaacaacattttcgccattggcgacaatgcatttgccgggctgcctccaaccgcccaagtagcgcaccaagaagccgaatatttggccaagaattttgataagatggctcaaataccaaatttccaaaagaatctatcctccagaaaggataagattgacctcttgttcgaggagaacaactttaaacccttcaaatacaacgacctgggcgccttagcatacctgggatccgaaagagccattgcaaccatacgttccggtaagagaacattttacaccggtggaggcctgatgaccttctacttatggcggatcttgtacttgtccatgattctaagcgcccgcagcagattaaaggtctttttcgactggattaaactggccttcttcaaaagagacttctttaaaggcttatag

SEQ ID NO: 85 - DNA, 1542 bp, Artificial Sequence
  source: /note="Description of Artificial Sequence: Synthetic polynucleotide"
atgctgagcaagaacttgtatagcaacaagaggttgctcacctcgacgaatacgctcgtcagattcgcttccaccagatccaccggggtcgaaaacagcggggcaggtcctacatctttcaagaccatgaaggtcattgaccctcagcacagcgacaaacccaacgtgctgatactgggttcggggtggggcgctatttcgtttttaaagcacattgacaccaagaagtacaacgtttccatcatctctcctagaagctacttcttatttacccctttgttacccagcgccccagttgggacagtagacgaaaagtccattattgagcccatcgttaactttgctctgaagaaaaaggggaacgttacctactatgaggcagaggccacctctatcaaccccgacaggaacaccgttaccatcaaatcattaagcgccgtttcccagctataccagcctgaaaaccatctagggctgcatcaagcagaacccgccgaaattaagtacgattatttaatcagcgctgtaggtgcggaacctaacacatttggtattcctggcgtcactgactacggccatttcctgaaggagattcccaacagcttggaaatcagaagaactttcgccgccaatctagaaaaggctaacttattgcctaagggcgatcccgaacggagaagactactgtccattgtcgtcgtgggtggagggcccactggtgtagaggccgctggcgagctgcaggactatgttcaccaggacctgagaaagtttctccccgcattggccgaggaagtccaaattcacctggtcgaagctctgcccatcgtgctgaacatgtttgagaaagagctgagctcatacgcgcaatcacatttagaaaacacttcgatcaaagtacatctgagaaccgccgtcgccaaagtggaagagaagcaattgctggccaagaccaaacacgaggacggtaaaataaccgaagaaactattccctacggtactttgatttgggccaccggtaacaaggcaagacccgtgatcaccgaccttttcaagaagatccctgagcaaaactcgtccaagcggggattggcagtgaatgactttttgcaggtcaaaggcagcaacaacatcttcgccatcggtgacaatgcatttgctgggttgccaccaaccgcccaggtagcgcaccaagaagccgaatacttggccaagaatttcgataaaatggctcaaatccccaatttccaaaagaatctgtcttccagaaaggataaaatcgatctcttgttcgaggagaacaacttcaaacctttcaagtacaacgatttaggtgccttagcatacctgggcagcgaaagggccattgcaaccatacgtagcggtaagagaacattttacaccggtggtggcctgatgaccttctacctgtggcggattttgtacttgtccatgattctatctgcacgcagcagattaaaggtctttttcgactggattaaattagccttcttcaaaagggactttttcaaaggcttatag

SEQ ID NO: 86 - DNA, 1542 bp, Artificial Sequence
  source: /note="Description of Artificial Sequence: Synthetic polynucleotide"
atgctaagcaagaatttgtatagtaacaagaggttgctcacctcgacgaatacgctagtcagattcgcttccaccagatccacaggggtggaaaactccggagcaggtcctacctctttcaagaccatgaaggtcattgacccccagcacagcgacaaaccaaacgtgctgatactgggttcggggtggggcgctatttcgtttctgaagcacattgacaccaagaagtacaacgtttccatcatctctcccagaagctatttcttatttacgcctttgctgccttctgcaccagttgggaccgtagacgagaagtccattattgagcccatcgttaattttgctctcaagaaaaaggggaacgttacctactatgaggcagaggccaccagcatcaatcccgacaggaacaccgtgaccataaaatcattatctgccgttagccagctataccaacctgaaaaccacctggggctgcaccaggcagaacccgccgagattaagtacgactacctgatcagtgctgtgggcgccgagcctaacacatttggtattcctggggtcactgactacggccatttcctgaaagagattcccaactctttggaaataagaagaactttcgccgccaatctggagaaggctaacttactgccaaagggtgatcccgaaagaagaagactactgtccattgtggtggttggtggaggccctactggcgtggaggccgctggtgaactgcaggactatgtgcaccaggacctgcggaagttcctgcctgccttggccgaagaagtccaaattcacttggtggaagctctgcccatcgtgttgaatatgtttgagaaaaagctttcatcatacgcccaaagccacttagaaaacacttcgatcaaagtgcatctgagaacggctgtcgccaaagttgaagagaagcaactgttggccaagaccaaacacgaggacggtaaaataaccgaagaaactattccctacggtactttgatttgggccaccggcaacaaggccagacccgtgatcactgaccttttcaagaaaatccccgagcaaaactcgagcaagagaggattggcagtgaatgacttcttgcaggtgaaaggcagcaacaacattttcgccattggtgacaatgcatttagcgggttgcctcctaccgcccaagtagcgcaccaagaggccgaatatctggccaagaactttgataaaatggctcagatcccaaatttccagaagaacctgtcttcacggaaggataaaattgacctcttgttcgaggaaaacaacttcaagcctttcaaatacaacgacttaggcgccttagcatacctgggctccgaaagggccattgccaccataagatccggtaagcggaccttttacaccggtggtggcttaatgaccttctacttatggagaattttgtacctgagcatgatcctatctgccagaagcagattaaaggtctttttcgactggatcaaattagcatttttcaagagggacttttttaagggcttatag

SEQ ID NO: 87 - DNA, 1542 bp, Artificial Sequence
  source: /note="Description of Artificial Sequence: Synthetic polynucleotide"
atgctatcgaagaatttgtatagcaacaagaggttgctcacctcgaccaacacgctagtgagattcgctagcaccagatccaccggggtggaaaactccggggcaggtcccacaagcttcaagaccatgaaagtcattgacccccagcacagcgacaaacccaacgtgctgatactgggttcgggctggggcgctatttcgtttttaaagcacattgacaccaagaagtacaacgttagcatcatctctcccagaagctatttcttatttacgcctctgttaccttctgcaccagtggggacagtagacgagaagtccattattgagcccatcgttaattttgctctcaagaaaaaggggaacgttacctactatgaggcagaggccacctctatcaatcccgacaggaacaccgttaccatcaagtcattaagcgccgtgtcccagctataccaacccgaaaaccatctagggatgcatcaggcagagcctgccgagattaagtacgactatttaatcagtgctgtgggtgcggagcctaacacatttggaattcctggggtcactgattacggccatttcctgaaggagattcccaactctctggaaataagaagaacctttgccgccaatctagagaaggctaacctgctgcctaagggcgaccccgaaagaagaagactgctgagcattgtcgtggtgggtggaggccctactggtgtagaggctgctggtgaactacaggactacgttcaccaggacctgcggaagtttctccctgcattggccgaagaagtccagattcacctggtcgaagccctgcccatcgttttgaacatgtttgagaaaaagctgtcatcatacgcgcagagccatctggaaaacacttccatcaaagtacatctgagaaccgctgtggccaaagttgaagaaaagcaattgttggcaaagaccaaacacgaagacggcaaaataaccgaagaaactattccctacggtactctgatttgggccacgggtaacaaggcaagaccggtaatcaccgaccttttcaagaagattcctgagcaaaactcgtccaagcggggcttggccgtgaatgacttcctgcaggtgaaaggcagcaacaacattttcgccattggcgacaatgcatttgctgggctgccaccaaccgcccaagtagcgcaccaggaggccgaatatttggccaagaactttgataaaatggctcaaataccaaatttccagaagaacctatcctccagaaaggataaaattgacctcttgttcgaggagaacaactttaaacctttcaagtacaacgatttaggtgccctggcatacctgggatccgaaagggccattgccaccatcagatccggcaagagaacattttacaccggtggaggcttaatgaccttctacttatggcggattctgtacttgtccatgatcctgagcgcaagaagcagactgaaggtctttttcgactggattaaattagcatttttcaaaagagacttcttcaaaggattatag

SEQ ID NO: 88 - DNA, 1542 bp, Artificial Sequence
  source: /note="Description of Artificial Sequence: Synthetic polynucleotide"
atgctatcgaagaacctgtatagtaacaagcggttgctcaccagcacgaacacgctagtcagattcgcttccaccagatccaccggggtggaaaacagcggagcaggtcctacatcttttaagaccatgaaggtcattgaccctcagcacagcgacaagccaaacgtgctgatactgggttctgggtggggagctatttcgtttttaaagcacattgacaccaagaagtacaacgtttccatcatctctcccagaaagtacttcttattcacccctttgctgcctagcgccccagttggaaccgtagacgagaagtccattattgagcccatcgttaattttgccctcaagaaaaaggggaacgttacctactatgaggcagaagccacctctatcaatcccgacaggaataccgtgaccataaaatcactgtctgccgtttcccagctataccaacctgaaaaccatctaggcctgcatcaagcagagcctgctgaaattaagtacgattatttaatcagtgctgtgggcgcggagcccaacacatttggaattcctggggtgactgactacggccatttcctgaaggagatccccaactctttggaaatcagaagaactttcgccgccaatctagagaaggctaacctgttgcctaagggcgatcccgaaagaagaagactactgagcattgtcgtggttggtggtgggcctactggcgtagaagccgctggtgaactgcaggattatgtgcaccaggacctgagaaagtttctgcctgcactggccgaagaagtccagattcacttggtcgaagctctgcccatcgttctgaatatgtttgagaagaagctttcatcatacgcgcaatcacatttagaaaacacttccatcaaagtgcatctgagaacggccgtggccaaggttgaagaaaagcagctgttggcaaagaccaagcacgaagacggtaaaataaccgaagaaaccattccatacggcactctgatttgggccacgggtaacaaggcaagaccggtaatcactgacctgttcaagaagattcccgagcaaaactcgtccaagcggggcctggcagtgaatgacttcttgcaggtgaaaggcagcaacaacatcttcgccatcggcgacaatgcatttgctgggctgccaccaaccgcccaagtggcgcaccaggaggccgaatatttggccaagaatttcgacaagatggctcagatcccaaatttccagaagaatctatcttcaagaaaggataaaattgatctcctgttcgaggagaacaacttcaagcctttcaagtacaacgatttaggtgccttagcatacctgggctccgaaagagccattgccaccataagatccggcaagagaaccttctacaccggtggtggcttaatgaccttctacttatggcggattttgtacttgtccatgattctgtctgcccgctcgagattaaaggtcttcttcgactggattaaattagcatttttcaagagggacttttttaaaggattatag

SEQ ID NO: 89 - DNA, 1542 bp, Artificial Sequence
  source: /note="Description of Artificial Sequence: Synthetic polynucleotide"
atgctaagcaagaatttgtatagtaacaagaggttgctgaccagcacgaatacgctagtgagattcgcttccaccagatccacaggggtggaaaactccggagcaggtcccacaagcttcaagaccatgaaagtcattgacccccagcacagcgacaaacccaacgtgctgatactgggttcggggtggggagctattagctttttaaagcacattgacaccaagaagtacaacgtttccatcatcagccccagaagctacttcttatttacgcctttgttacccagcgccccagtggggacagtagacgaaaagtccatcattgagcccatcgtgaacttcgctctgaagaaaaagggcaacgtcacctactatgaggcagaagccacctctatcaatcccgacaggaataccgttaccatcaaaagcctgtctgccgtgagccagctataccaacctgaaaaccacctggggctgcaccaagcagaacctgctgaaattaagtacgactatttaatcagcgctgtaggtgcggaacctaacacatttggtatccctggggtcactgactacggtcatttcttcaaagaaattcccaactctttggaaataagaagaacttttgccgccaatctagagaaggctaacttattgcctaagggtgatcccgaacggagaagactactgtccattgtcgtggttggtggtgggcctacaggcgtagaggccgctggcgagctgcaggattacgtgcaccaggacctgcggaagtttctgcccgcactggccgaagaagtccaaattcacttggtggaagccctgcccatcgtgctgaatatgttcgagaaaaagctttcatcatacgcgcagtcacacttagaaaacacttccatcaaggtacatctgagaacggctgtcgccaaggttgaagaaaagcagttgttggccaagaccaaacacgaagacggtaaaataaccgaagaaactatcccatacggtactttgatttgggccaccggtaacaaggccagaccggtaatcactgacctgttcaagaaaatccctgagcaaaactcgtccaagagaggactggcagtgaatgactttttgcaggtgaaaggcagcaacaacattttcgccattggtgacaacgcatttgctgggctgcctccaacagcccaggtagcccaccaagaggccgaatatctggccaagaacttcgataaaatggctcagataccaaatttccaaaagaacctatcctcacggaaggataagattgacctcttgttcgaggagaacaactttaaacctttcaaatacaacgatttaggtgccttagcatacctgggatccgaaagggccattgcaaccataagaagcggtaagcggacattctacaccggtggtggcctgatgaccttctacctgtggcggatcttgtacctgtccatgatcctatctgcaagatcgagattaaaggtgttcttcgactggattaaactggcatttttcaagagagacttcttcaaaggattatga

SEQ ID NO: 90 - DNA, 1542 bp, Artificial Sequence
  source: /note="Description of Artificial Sequence: Synthetic polynucleotide"
atgctatcgaagaatttgtatagtaacaagaggttgctgacctcgacgaacacgatggtcagattcgcttccaccagatccacaggcgtcgaaaacagcggagcaggtcccaccagcttcaagaccatgaaagtcatcgaccctcagcacagcgacaaaccaaacgtgctgatactgggttcggggtggggagctatttcgtttttaaagcacattgacaccaagaagtacaacgtttccatcatctctcctagaagctacttcctgtttacgcccttgttacctagcgcaccagtggggaccgtagacgaaaagtcaattattgagcccatcgtgaattttgctctcaagaaaaaggggaacgttacctactatgaggccgaggccacctctatcaaccccgacaggaataccgtgaccataaaatcattatctgccgttagccagctgtaccaacctgaaaaccatctggggctgcaccaagccgaacctgctgaaattaagtacgattacttaatcagcgccgtaggcgcggagcctaacacatttggtattcctggggtcactgattacggccatttcctgaaggagattcccaactctctggaaataagaagaacctttgccgccaacctagaaaaggctaacctgttgcctaagggcgatcccgaacggagaagactactgtccattgtggtggttggtggaggccctactggcgtagaggctgctggcgaactacaggattacgttcaccaggacctgcggaagtttctccccgccttggccgaggaagtgcaaattcacttggtcgaagctctgcccatcgttctgaatatgtttgagaagaagcttagctcatacgcgcaatcacacttagaaaacacctccatcaaggtacatctgagaacggctgtcgccaaagttgaagagaagcaactgctggcaaagaccaagcacgaagacggcaagataaccgaggaaactattccatacggtaccttgatttgggccaccggtaacaaggcaagacccgtgatcaccgaccttttcaagaaaatccctgagcagaactcgtccaagagaggattggcagtgaatgactttttgcaggtcaaaggcagcaacaacattttcgccatcggcgacaatgcctttgccgggctgcctcctaccgcccaagtagcgcaccaagaggccgaatatttggccaagaattttgataaaatggctcagatacccaatttccaaaagaatctatcttcaagaaaggataaaattgatctcttgttcgaggagaacaactttaagcctttcaagtacaacgatctgggtgccttagcatacctgggatccgaaagggccattgcaaccataagatccggcaagagaacattttacaccggcggtggcttaatgaccttctacttatggagaattctgtacctgtccatgatcctgtctgcaagaagcagactgaaggtctttttcgactggattaaactggcattcttcaaaagagacttttttaaaggcctgtag

SEQ ID NO: 91 - DNA, 1542 bp, Artificial Sequence
  source: /note="Description of Artificial Sequence: Synthetic polynucleotide"
atgctgagcaagaatttgtacagcaacaagaggctgctcacctcgacgaatacgctcgtgagattcgcttccaccagatccacaggcgtcgaaaactccggagcaggtcctacaagcttcaagaccatgaaggtcatcgaccctcagcacagcgacaaaccaaacgtgctgatactgggctctgggtggggcgccatttcgtttttaaagcacattgacaccaagaagtacaacgtttccatcatcagccctagaaagtacttcttatttacgcccctgttaccttctgcccctgttgggaccgtagacgaaaagtcaattattgagcccatcgtgaatttcgctctcaagaaaaagggcaacgtcacctactatgaggcagaagccacctctatcaatcccgacaggaacaccgttaccataaaaagcttatctgccgttagccagctataccaacccgagaaccatctggggctgcaccaggccgaacctgctgaaattaagtacgactatttaatcagtgccgtaggcgcggaacctaacacatttggtatccctggggtcaccgattacggtcatttcctgaaagaaattcccaactctctggaaatacggcggaccttcgccgccaacctagagaaggctaacttattgccaaagggtgatcccgaaagaagaagactactgagcattgtcgtggtgggtggaggccctactggcgtagaagctgctggtgagctgcaggattatgtgcaccaggacctgagaaagtttctgcctgcattggccgaagaagtccagattcacttggtggaagctctgcccatcgttctgaacatgtttgagaaaaagctttcatcatacgcgcaatcacatttagaaaacacttcgatcaaagtacatctgagaacggccgtcgccaaagttgaagagaagcagctgctggcaaagaccaaacacgaggacggcaaaataaccgaagaaactattccatacggtactttgatttgggccacgggtaacaaggcaagacccgtaatcactgaccttttcaagaaaattcccgagcaaaactcgtccaagagaggattggccgtgaacgactttttgcaggtgaaaggcagcaacaacatcttcgccattggtgacaatgcatttgctgggttgccaccaaccgcccaagtagcgcaccaggaggccgaatacttggccaagaactttgataaaatggctcagatcccaaatttccagaagaatctatcttcaagaaaggataaaattgatctcctgttcgaggaaaacaactttaagcctttcaagtacaacgatttaggtgccttagcatacctgggaagcgaaagagccattgcaaccataagatccggtaagcggacattctacaccggtggtggcttaatgaccttctacctgtggagaattctgtacctgtccatgattctaagcgcaagaagcagattaaaggtgttcttcgactggattaaactggcatttttcaaaagagacttcttcaaaggattatag

SEQ ID NO: 92 - DNA, 1542 bp, Artificial Sequence
  source: /note="Description of Artificial Sequence: Synthetic polynucleotide"
atgctaagcaagaatctgtatagtaaccggaggttgctcacctcgacgaacaccctcgtccgcttcgcctccaccagatccacaggggtcgaaaactccggagcaggtcccacaagctttaagaccatgaaggtcatcgacccccagcacagcgacaaaccaaacgtgctgatcctgggttcggggtggggagccatttcgtttttaaagcacattgacaccaagaagtacaacgttagcatcatcagccctagaagctatttcttatttacgcctttgttacctagcgccccagtggggaccgtagacgaaaagtcaattatcgagcccatcgttaactttgccctgaagaaaaaggggaacgtcacctactatgaggccgaagccacctctatcaaccccgacaggaataccgtgaccatcaaatcattaagcgccgttagccagctataccaacctgagaaccatctaggcctgcatcaagcagagcctgccgaaattaagtacgattatctgatcagtgctgtgggtgcggaacctaacacatttggtattcctggggtcactgattacggtcatttcctgaaggaaatccccaacagcttggaaataagacggaccttcgccgccaatctggaaaaggccaacttattgccaaagggtgaccccgaaagaagaagactactgagcatcgtggtggtgggtggtggccccactggcgtagaggccgctggtgaactacaggactacgttcaccaggacctgagaaagtttctgcccgcactggccgaagaagtccaaattcacctggtcgaagctctgcccatcgttttgaatatgtttgagaaaaagctttcatcatacgcccagtcacatttagaaaacacttcgatcaaagtgcatctgagaaccgccgtcgccaaggttgaagagaagcaactgttggcaaagaccaaacacgaagacggcaagataaccgaagaaactattccatacggcactttgatttgggccacgggtaacaaggcaagaccggtaatcactgacctgttcaagaaaattcctgagcaaaacagctccaagagaggattggccgtgaatgactttctgcaggtcaaaggcagcaacaacattttcgccattggtgacaatgcctttgctgggttgccaccaaccgcccaagtagcgcaccaagaggccgaatatctggccaagaattttgacaagatggctcagataccaaatttccaaaagaatctatcctccagaaaggataaaattgatctcttgttcgaggagaacaacttcaaacctttcaagtacaacgatctgggcgccttagcatacctgggaagcgaaagggccattgccaccatccgttccggtaagagaaccttctacaccggtggtggcctgatgaccttctacttatggcggattttgtacttgtccatgattctatctgcacgctcgagattaaaggtctttttcgactggattaagctggcctttttcaaaagagactttttcaagggcttatag

SEQ ID NO: 93 - DNA, 1542 bp, Artificial Sequence
  source: /note="Description of Artificial Sequence: Synthetic polynucleotide"
atgctaagcaagaatttgtatagtaacaagaggctgctgaccagcacgaataccctagtgagattcgcttccaccagatccacaggggtcgaaaactccggagcaggtcctacatctttcaagaccatgaaagtcatcgaccctcagcacagcgacaaaccaaacgtgctgatcctgggctcgggctggggcgccatctcgtttttaaagcacatcgacaccaagaagtacaacgtttccatcatctctcctagaagctacttcttattcacgcctttgctgccctctgcccctgttgggaccgtagacgaaaagtcaattattgagcccatcgttaattttgctctgaagaaaaaggggaacgttacctactatgaggcagaagccacctctatcaatcccgacaggaataccgtgaccatcaaatcattaagcgccgttagccagctataccaacctgaaaaccacctggggctgcatcaagcagaacccgctgaaattaagtacgattatttaatcagtgccgtaggtgccgaacccaacacctttggtattcccggggtcactgattacggtcacttcctgaaggaaatccccaactctctggaaatcagaagaactttcgccgccaatctagaaaaggctaacttattgccaaagggtgatcccgagagaagaagactactgtccattgtggtggttggtggtggccccactggtgtagaggccgctggtgaactacaggattatgtgcaccaggacctgagaaagtttctccctgccttggccgaagaagtccaaattcacttggtcgaagctctgcccatcgttttgaatatgttcgagaaaaagctttcaagctacgcgcaatcacatctggaaaacacttccatcaaagtgcatctgagaacggccgtggccaaagttgaagagaagcagctgctggcaaagaccaaacacgaagacggtaaaataaccgaggaaaccattccctacggtaccttgatttgggccacgggtaacaaggcaagacccgtaatcactgaccttttcaagaaaattcctgagcaaaacagctccaagagaggactggcagtgaacgactttttgcaggtcaaaggcagcaacaacattttcgccattggtgacaacgcctttgctgggttgccacctaccgcccaagtagcgcaccaagaagccgagtacttggccaagaatttcgataagatggctcagataccaaatttccagaagaacctatcttcaagaaaggataagattgacctgctgttcgaggagaacaactttaagcctttcaaatacaacgacttaggtgccctggcatacctgggatccgaaagggccattgcaaccatcagaagcggtaagagaaccttctacaccggtggtggcctgatgaccttctacttatggagaattctgtacatgtccatgattctatctgccagaagcagattaaaggtgtttttcgactggattaaattagcattcttcaaaagggacttttttaagggactgtga

SEQ ID NO: 94 - DNA, 1542 bp, Artificial Sequence
  source: /note="Description of Artificial Sequence: Synthetic polynucleotide"
atgctgagcaagaatttgtacagtaacaagaggttgctcaccagcacgaatacgctagtgagattcgcttccaccagatccaccggggtcgaaaactccggagcaggtcccaccagctttaagaccatgaaggtcattgaccctcagcacagcgacaagccaaacgtgctgatactgggttcggggtggggagctatttcgtttttaaagcacatcgacaccaagaagtacaacgtttccatcatcagccctagaagctacttcctgttcacgcctctgttaccctctgccccagttgggacagtagacgaaaagtcaattattgagcccatcgttaatttcgctctcaagaaaaaggggaacgttacctactatgaggcagaggccaccagcatcaatcccgacaggaacaccgtgaccatcaaatcactgagcgccgtttcccagctataccaacctgagaaccatctaggcctgcaccaagcagaacccgctgaaattaagtacgattatttaatcagcgccgtaggcgccgaacctaacacatttggtattcctggggtcactgattacggccacttcctgaaggaaattcccaactctctggaaataagacggaccttcgccgccaacctagagaaggctaacctgttgccaaagggtgatcccgagcggagaaggctactgtccattgtggtggttggtggtggccccactggcgtagaggctgctggcgaactgcaggactatgttcaccaggacctgagaaagtttctccccgcattggccgaagaagtccaaattcacctggtcgaagccctgcccatcgttttgaatatgttcgagaaggagctgtcatcatacgcgcaatcacatttagaaaacacttccatcaaagtacatctgagaacggctgtcgccaaagttgaagaaaagcaattgttggcaaagaccaagcacgaagacggtaaaataaccgaagaaactattccatacggcaccctgatttgggccacgggtaacaaggccagaccggtaatcactgaccttttcaagaaaattcctgagcaaaacagctccaagcggggattggccgtgaatgactttttgcaggtgaaaggcagcaacaacatcttcgccattggtgacaacgcctttgctgggttgcctcctacagcccaagtagcccaccaagaggccgaatatttggccaagaattttgataaaatggctcaaatcccaaatttccagaagaatctatcctccagaaaggataaaattgatctgttgttcgaggagaacaactttaaacctttcaagtacaacgatctgggtgccttagcctacctgggatccgaaagagccattgcaaccatcagatccggtaagcggacattttacaccggtggaggcttaatgaccttctacttatggcggatcctgtacttgagcatgatcctatctgcacgctcgagattaaaggtctttttcgactggattaaactggcctttttcaaaagagacttttttaaaggactgtag

SEQ ID NO: 95 - DNA, 1542 bp, Artificial Sequence
  source: /note="Description of Artificial Sequence: Synthetic polynucleotide"
atgctatcgaagaacctgtacagcaacaagaggctgctcacctcgaccaacaccctagtcagattcgccagcaccagatccaccggggtggaaaacagcggagctggccccacaagcttcaagaccatgaaagtcatcgacccccagcacagcgacaagccaaacgtgctgatcctgggttcgggctggggagccatcagctttctgaagcacattgacaccaagaagtacaacgttagcatcatcagccccagaagctacttcctgttcacgcccttgctgccctctgcaccagtggggaccgtggacgagaagtcaattatcgagcccatcgtgaatttcgccctgaagaaaaagggcaacgtcacctactacgaggccgaggccacctctatcaaccccgaccggaataccgtgaccatcaaaagcttatctgccgtgtcccagctataccagcctgaaaaccacctgggcctgcaccaggcagagcctgccgaaattaagtacgattatctgatcagcgccgtgggcgcggaacccaacacctttggaatccccggggtgactgactacggccacttcctggaggagatccccaacagcctggaaatcagacggacctttgccgccaacctggaaaaggctaacctgttgcctaagggcgaccccgagagaagaagactgctgagcattgtcgtggtgggcggtggccccactggtgtagaagccgctggtgaactgcaggactatgtgcaccaggacctgcggaagttcctccccgcactggccgaggaagtgcaaattcacttggtcgaagccctgcccatcgtgttgaacatgtttgagaagaagctttcaagctacgcccaaagccacctggaaaacacctccatcaaagtgcatctgagaaccgctgtcgccaaggtggaagagaagcaactgctggccaagaccaagcacgaggacggtaagattaccgaggaaaccatcccatacggcaccctgatttgggccacgggtaacaaggccagacccgtgatcactgacctgttcaagaagatccccgagcaaaactcgtccaagcggggactggccgtgaacgactttctgcaggtcaaaggcagcaacaacatcttcgccatcggcgacaatgcctttgctggcttgccacctaccgcccaagtggcccaccaagaggccgaatatttggccaagaatttcgataaaatggctcagatcccaaatttccagaagaacctgtcctcccggaaggataaaatcgacctgttgttcgaggagaacaacttcaagcccttcaagtacaacgatttaggtgccctggcctacctgggcagcgaaagggccattgcaaccatcagaagcggcaagcggacattttacaccggcggtggcttaatgaccttctacctgtggagaattctgtacctgtccatgattctgtctgcccgcagcagattaaaggtctttttcgactggattaagttagcatttttcaagagagacttcttcaagggcctgtga

SEQ ID NO: 96 - DNA, 1542 bp, Artificial Sequence
  source: /note="Description of Artificial Sequence: Synthetic polynucleotide"
atgctaagcaagaacttgtatagcaacaagcggctgctgaccagcacgaacacgatggtgagattcgccagcaccagatccacaggggtcgaaaacagcggagctggccccaccagcttcaagaccatgaaagtcatcgacccccagcacagcgacaaacccaacgtgctgatcctgggttctggctggggagccattagctttttaaagcacatcgacaccaagaagtacaacgtttccatcatctctcccagaagctacttcctgttcacccctctgctgccctctgcacctgtggggacagtggacgaaaagtcaatcatcgagcccatcgtgaatttcgctctgaagaaaaaggggaacgtcacctactacgaggccgaagccaccagcatcaaccccgaccggaacaccgtgaccatcaagagcttaagcgccgtttcccagctgtaccagcctgagaaccacctgggcctgcaccaagcagaacccgccgagattaagtacgattatttaatcagcgctgtgggcgccgagcctaacacctttggtattcctggcgtcactgactacggtcacttcctgaaggagatccccaacagcctggaaatcagacggacctttgccgccaacctggaaaaggctaacctgctgcctaagggcgaccccgagcggagaaggctactgtccatcgtggtcgtgggcggaggccccacaggcgtggaagccgctggtgagctgcaggattatgttcaccaggacctgcggaagtttctccctgccttggccgaggaagtgcagattcacctggtcgaagccctgcccatcgttctgaacatgtttgagaaaaagctgtcatcatacgcgcagagccatttagaaaacacctccatcaaggtgcatctgagaaccgctgtcgccaaagtggaagagaagcagttgctggcaaagaccaagcacgaagacggcaaaataaccgaagaaaccatcccctacggtaccctgatttgggccaccggtaacaaggcaagacccgtaatcactgacctgttcaagaaaatccctgagcaaaacagctccaagagaggcctggcagtgaacgactttctgcaggtgaaaggcagcaacaacattttcgccatcggtgacaatgcatttgccggcttgcctccaacagcccaagtagcgcaccaggaggccgagtacctggccaagaatttcgacaagatggctcagatcccaaatttccaaaagaacctatcctcccggaaggataaaattgatctgctgttcgaggaaaacaacttcaagcctttcaagtacaacgatctgggcgccctggcatacctgggcagcgaaagggccattgccaccatcagatccggcaagcggacattttacaccggcggtggcctgatgaccttctacttatggcggatcctgtacttgtccatgatcctaagcgcacgcagcagattaaaggtcttcttcgactggatcaaactggcattcttcaagagggacttcttcaagggactgtga

SEQ ID NO: 97 - DNA, 1542 bp, Artificial Sequence
  source: /note="Description of Artificial Sequence: Synthetic polynucleotide"
atgctatcgaagaacttgtatagtaacaagaggttgctcaccagcaccaataccctagtgagattcgcctccaccagatccaccggggtggaaaactccggggctggccccacctctttcaagaccatgaaggtcattgaccctcagcacagcgacaaaccaaacgtgctgatactgggctctggctggggcgccattagctttctgaagcacatcgacaccaagaagtacaacgtttccatcatctctcccagaagctacttcttattcacccccttgttaccctctgcaccagttgggaccgtagacgagaagtccatcatcgagcccatcgtgaacttcgccctcaagaaaaagggcaacgtcacctactatgaggcagaagccaccagcatcaaccccgaccggaataccgttaccataaagaacctgtctgccgtttcccagctgtaccagcccgagaaccacctgggcctgcatcaggcagaacccgctgagattaagtacgattacctgatcagtgccgtgggcgcggagcccaacacatttggtatccctggcgtgaccgactacggccacttcctgaaggagattcccaacagcttggaaatcagacggaccttcgccgccaacctggaaaaggctaacctgttgcctaagggcgatcccgagcggagaaggctgctgagcattgtcgtggtgggcggaggccccacaggcgtggaagctgctggcgagctgcaggattatgtgcaccaggacctgcggaagttcctgcccgcattggccgaggaagtccagattcacctggtggaagccctgcccatcgttctgaacatgttcgagaaaaagctgagcagctacgcgcagtcacatctggaaaacacttccatcaaagtgcacctgagaaccgctgtggccaaagtggaagaaaagcaactgttggccaagaccaaacacgaggacggtaagattaccgaagaaaccatcccctacggtaccctgatttgggccacgggcaacaaggccagaccggtaatcactgaccttttcaagaagatccctgagcaaaacagcagcaagcggggattggccgtgaatgactttttgcaggtgaaaggcagcaacaacatcttcgccatcggcgacaatgcctttgccggcctgcctcctacagcccaagtagcccaccaggaagccgaatatttggccaagaacttcgataaaatggctcagatcccaaatttccagaagaacctgtcttcacggaaggataaaatcgacctcctgttcgaggaaaacaacttcaagcccttcaaatacaacgatctgggtgccctggcctacctgggcagcgaaagagccattgccaccataagatccggcaagagaacattttacaccggtggaggcctgatgaccttctacctgtggcggatcctgtacttgtccatgatcctgtctgccagatcgagactgaaggtctttttcgactggatcaagttagccttcttcaagagggacttcttcaaaggcctgtga

SEQ ID NO: 98 - DNA, 1542 bp, Artificial Sequence
  source: /note="Description of Artificial Sequence: Synthetic polynucleotide"
atgctgagcaagaatctgtacagcaacaagcggttgctcaccagcaccaatacgctagtcagattcgcttccaccagatccaccggggtggaaaactccggagctggccctacatctttcaagaccatgaaggtcatcgaccctcagcacagcgacaaacccaacgtgctgatcctgggctctggctggggagccatcagctttctgaagcacatcgacaccaagaagtacaacgtcagcatcatcagccccagaaagtacttcttattcacccctctgctgcccagcgcccctgtgggaaccgtagacgagaagtccattattgagcccatcgttaactttgccctgaagaaaaaggggaacgtcacctactatgaggcagaagccaccagcatcaatcccgaccggaacaccgtgaccatcaagtcactgagcgccgtgagccagctgtaccagcccgagaaccacctggggctgcatcaagccgagcccgctgagattaagtacgactacttaatcagcgccgtgggcgccgagcccaacacctttggtatccctggggtgaccgactacggtcacttcctgaaagaaattcccaactctttggaaataagacggaccttcgccgccaacctagaaaaggccaacctgctgcctaagggtgaccccgaaagaagaaggctgctgtccattgtggtcgtgggtggagggcccactggtgtggaggctgctggtgagctgcaggactacgttcaccaggacctgcggaagtttctgcctgccttggccgaggaagtgcagattcacttggtggaagccctgcccatcgtgttgaacatgttcgagaagaagctgagctcatacgcccagagccacttagaaaacacttccatcaaggtgcacctgagaaccgctgtcgccaaagttgaagagaagcaactgctggcaaagaccaagcacgaggacggcaaaataaccgaggaaactatcccctacggtactttgatttgggccaccggcaacaaggcaagaccggtaatcactgacctgttcaagaaaattcccgagcagaacagcagcaagagaggcctggccgtgaatgactttctgcaggtcaaaggcagcaacaacattttcgccatcggcgacaacgcatttgccggcctgccacctaccgcccaagtagcccaccaagaagccgagtacctggccaagaacttcgataagatggcccaaataccaaatttccagaagaacctgtcctcaagaaaggataaaatcgatctcttgttcgaggaaaacaacttcaaacccttcaagtacaacgatttaggcgccctggcctacctgggctccgaaagggccattgccaccatccgtagcggcaagcggaccttctacaccggcggaggcctgatgaccttctacctgtggagaattttgtacttgtccatgatcctaagcgccagaagcagattaaaggtctttttcgactggatcaaactggcatttttcaagagagacttcttcaagggcttatga

SEQ ID NO: 99 - DNA, 1542 bp, Artificial Sequence
  source: /note="Description of Artificial Sequence: Synthetic polynucleotide"
atgctaagcaagaacttgtacagcaacaagaggctgctgaccagcaccaataccctagtccgcttcgctagcaccagatccaccggggtggaaaacagcggagcaggtcctacaagcttcaagaccatgaaggtcatcgacccccagcacagcgacaaacccaacgtgctgatcctgggttcggggtggggcgctatcagctttctgaagcacattgacaccaagaagtacaacgtttccatcatctctcccagaaagtacttcttattcacgcccttgttacctagcgcacctgttggaaccgtggacgaaaagtccatcattgagcccatcgtgaatttcgccctgaagaaaaaggggaacgtcacctactatgaggcagaggccacctctatcaaccccgaccggaacaccgtgaccataaaaagcttaagcgccgtgtcccagctgtaccaacccgaaaaccacctaggcctgcaccaggccgaacccgctgaaattaagtacgactacctgatcagcgccgtgggcgcggagcccaacacatttggtatccctggcgtgaccgactacggtcacttcctgaaagaaatccccaacagcttggaaatcagaagaaccttcgccgccaacctggagaaggctaacctgctgccaaagggcgaccccgagagaagaaggctactgtccatcgtggtggttggcggaggccccacaggcgtggaagccgctggcgaactacaggactacgtgcaccaggacctgcggaagtttctgcccgccctggccgaagaagtgcaaattcacctggtcgaagccctgcccatcgtgctgaatatgttcgagaagaagcttagcagctacgcccagtcacacttagaaaacacttcgatcaaagtgcacctgagaaccgctgtggccaaggttgaagagaagcagttgttggccaagaccaagcacgaggacggcaagattaccgaggaaaccatcccctacggtaccctgatttgggccacgggtaacaaggcaagacccgtgatcactgaccttttcaagaaaatccctgagcaaaactcgagcaagcggggcttggccgtgaacgactttctgcaggtgaaaggcagcaacaacattttcgccatcggtgacaacgcatttgctgggctgccacctacagcccaggtggcgcaccaagaagccgagtacctggccaagaacttcgacaaaatggcccagatacccaatttccagaagaatctatcctccagaaaggataagattgatctgctgttcgaggaaaacaacttcaaacctttcaagtacaacgatttaggcgccttagcctacctgggctccgaaagagccattgccaccatacgtagcggtaagagaaccttttacaccggtggaggcctgatgaccttctacctgtggagaatcttgtacctgagcatgatcctaagcgcccgcagcagactgaaggtgttcttcgactggattaaattagcctttttcaagagggacttcttcaaaggcctgtga

SEQ ID NO: 100 - DNA, 1542 bp, Artificial Sequence
  source: /note="Description of Artificial Sequence: Synthetic polynucleotide"
atgctgagcaagaacctgtacagcaacaagcggctgctcaccagcacgaataccctcgtcagattcgccagcaccagatccacaggggtcgaaaacagcggagctggtcccaccagcttcaagaccatgaaggtcatcgacccccagcacagcgacaaacccaacgtgctgatcctgggctcggggtggggcgccattagctttctgaagcacattgacaccaagaagtacaacgtctccatcatctctcctagaagctacttcttatttacccccctgttacccagcgccccagttgggaccgtggacgaaaagtccatcatcgagcccatcgtgaacttcgccctgaagaaaaagggcaacgtcacctactacgaggccgaagccacctctatcaaccccgaccggaacaccgttaccatcaaatcactgtctgccgtgtcccagctgtaccagcctgaaaaccatctgggcctgcatcaggcagaacccgccgaaattaagtacgactacttaatcagcgccgtgggcgcggagcccaacacctttggtattcctggcgtcaccgactacggtcacttcttcaaggagatccccaacagcctggaaatccggagaactttcgccgccaacctggaaaaggccaacttattgccaaagggtgatcccgaacggagaagactgctgagcatcgtggtggtgggcggaggccctacaggcgtagaggctgctggtgaactacaggactatgtgcaccaggacctgagaaagtttctccctgccctggccgaggaagtccaaattcacctggtcgaagccctgcccatcgtgctgaacatgttcgagaagaagctttcaagctacgcccaatcacatttagaaaacacctccatcaaggtacacctgagaaccgctgtggccaaggtggaagagaagcaactgttggccaagaccaagcacgaagacggcaaaattaccgaagaaaccatcccctacggtactttgatttgggccaccggcaacaaggccagaccggtgatcaccgaccttttcaagaagatccctgagcagaactcgtccaagcggggcttggcagtgaacgacttcttgcaggtgaaaggcagcaacaacatcttcgccatcggcgacaacgcatttgccgggctgcctcctaccgcccaagtagcccaccaggaagccgagtatttggccaagaattttgacaagatggcccagataccaaatttccagaagaatctatcctcaagaaaggataagattgatctgttgttcgaggaaaacaacttcaagcctttcaaatacaacgacttaggcgccctggcatacctgggcagcgaaagagccattgccaccatcagaagcggcaagagaacattctacaccggcggaggcctgatgaccttctacctgtggcggattttgtacctgtccatgattctgtctgcccgcagcagactgaaggtgttcttcgactggattaaactggcattcttcaagagggacttcttcaagggattatag

SEQ ID NO: 101 - DNA, 1542 bp, Artificial Sequence
  source: /note="Description of Artificial Sequence: Synthetic polynucleotide"
atgctaagcaagaacctgtacagtaacaagaggttgctgaccagcaccaatacgctagtccgcttcgccagcaccagatccaccggggtggaaaacagcggagctggccccacaagcttcaagaccatgaaggtcattgaccctcagcacagcgacaagccaaacgtgctgatactgggttctggctggggcgctatttcgtttctgaagcacattgacaccaagaagtacaacgtcagcatcatctctcccagaagctatttcctgttcacccccctgttaccctctgccccagttggaaccgtggacgagaagtccatcatcgagcccatcgtgaacttcgccctgaagaaaaaggggaacgttacctactacgaggccgaagccaccagcatcaaccccgaccggaacaccgtgaccataaaatcattatctgccgttagccagctgtaccagcctgaaaaccacctggggctgcatcaggccgagcctgctgagattaagtacgattacctgatcagtgccgtgggcgcggaacccaacacctttggaatccccggggtgaccgactacggccatttcctgaaagaaatccccaactctctggaaatccggagaaccttcgccgccaacctggaagaggccaacctgctgccaaagggcgaccccgaaagaagaagactgctgagcatcgtcgtggtgggcggaggccccactggcgtggaagctgctggcgaactgcaggattacgttcaccaggacctgcggaagttcctgcctgccctggccgaggaagtccaaattcacttggtcgaagctctgcccatcgttttgaatatgttcgagaaaaagctgtcaagctacgcccagtcacacctggaaaacacctcgatcaaggtgcacctgagaacggccgtcgccaaggtggaagaaaagcaactgctggcaaagaccaaacacgaagacggcaagattaccgaagaaaccatcccatacggtaccttgatttgggccacgggcaacaaggccagaccggtaatcactgaccttttcaagaagattcctgagcagaacagctccaagagaggcctggcagtgaatgacttcctgcaggtcaaaggcagcaacaacatcttcgccattggcgacaatgcatttgctggcctgcctccaacagcccaagtggcccaccaggaagccgagtacctggccaagaactttgacaagatggcccagataccaaatttccaaaagaatctgtcctccagaaaggataagatcgacctgttgttcgaggaaaacaactttaagcccttcaagtacaacgacctgggtgccttagcctacctgggctccgaaagagccattgccaccataagatccggtaagcggaccttttacaccggtggaggcctgatgaccttctacctgtggcggattctgtacctgagcatgattctgagcgcacgctcgagactgaaggtcttcttcgactggatcaaactggcatttttcaagagagacttcttcaagggcctgtag

SEQ ID NO: 102 - DNA, 1542 bp, Artificial Sequence
  source: /note="Description of Artificial Sequence: Synthetic polynucleotide"
atgctaagcaagaatctgtatagcaacaagaggctgctgacctcgacgaacacgatggtcagattcgctagcaccagatccaccggcgtggaaaacagcggggcaggccccacaagcttcaagaccatgaaagtcattgaccctcagcacagcgacaagccaaacgtgctgatcctgggctctggctggggagccatcagctttctgaagcacatcgacaccaagaagtacaacgtctccatcatctctcccagaagctacttcctgttcacgcccttgctgccctctgcacctgtgggaaccgtagacgaaaagtccattatcgagcccatcgtgaacttcgccctgaagaaaaagggcaacgtcacctactacgaggccgaggccacctctatcaaccccgacaggaacaccgttaccatcaaaagcctgagcgccgtgagccagctgtaccagcccgagaaccatctgggcctgcaccaggcagagcccgccgagattaagtacgattacttaatcagtgccgtgggtgccgaacccaacacctttggaattcccggcgtgaccgactacggtcatttcctgaaagagatccccaactctctggaaatcagaagaactttcgccgccaacctagaaaaggctaacctgttgcctaagggtgatcccgaaagaagaagactactgtccatcgtggtggttggcggagggcccactggcgtggaggctgctggtgagctgcaggactacgttcaccaggacctgagaaagttcctgcctgccttggccgaagaagtgcaaattcacttggtcgaagccctgcccatcgtgctgaacatgttcgagaaaaagctgtcaagctacgcccagtcacacctggaaaacacctccatcaaagtacatctgagaacggccgtcgccaaggtggaagagaagcagctgttggcaaagaccaagcacgaggacggcaaaataaccgaagaaaccattccctacggtaccctgatttgggccaccggcaacaaggccagaccggtgatcaccgaccttttcaagaagatccccgagcagaacagcagcaagagaggcctggcagtgaatgacttcctgcaggtcaaaggcagcaacaacatcttcgccatcggtgacaacgcctttgccggcctgccacctacagcccaagtggcgcaccaagaggccgagtacctggccaagaattttgataagatggcccagatcccaaatttccagaagaatctatcctcaagaaaggataagatcgatctcctgttcgaggagaacaacttcaaacccttcaagtacaacgatctgggcgccctggcatacctgggcagcgaaagggccattgcaaccataagatccggcaagagaacattctacaccggcggtggcttaatgaccttctacttatggcggattctgtacctgagcatgatcctaagcgcacgcagcagactgaaggtgtttttcgactggattaaactggccttcttcaaaagggacttttttaagggcttatga

SEQ ID NO: 103 - DNA, 1542 bp, Artificial Sequence
  source: /note="Description of Artificial Sequence: Synthetic polynucleotide"
atgctgtcgaagaacttgtatagcaacaagaggctgctgaccagcacgaacaccctcgtgagattcgccagcaccagatccaccggcgtcgaaaactccggagctggtcccacctctttcaagaccatgaaggtcatcgaccctcagcacagcgacaagcccaacgtgctgatcctgggttctggctggggagccattagctttttaaagcacatcgacaccaagaagtacaacgtctccatcatctctcccagaagctatttcttattcacgcccctgctgcctagcgcacctgtggggaccgtggacgagaagtcaattatcgagcccatcgtgaattttgctctcaagaaaaagggcaacgttacctactatgaggccgaggccacctctatcaaccccgaccggaacaccgtgaccataaagaacctgagcgccgtgagccagctgtaccaacccgaaaaccacctgggcctgcaccaggcagaacccgccgagattaagtacgattatttaatcagcgccgtaggcgccgagcccaacacctttggtattcccggcgtgaccgactacggtcatttcctgaaagagattcccaacagcctggaaatccggcggacttttgccgccaatctagaaaaggctaacctgctgcctaagggtgaccccgagcggagaaggctgctgagcattgtcgtcgtgggtggagggcctactggcgtggaagccgctggcgaactgcaggattacgttcaccaggacctgagaaagttcctgcccgccctggccgaggaagtccaaattcacttggtggaagctctgcccatcgtgctgaacatgttcgagaaaaagctgtcatcatacgcccagtcacacttagaaaacacttccatcaaagtacacctgagaaccgctgtggccaaggttgaagaaaagcaattgctggcaaagaccaagcacgaggacggcaaaataaccgaagaaaccattccatacggtaccttgatttgggccacgggcaacaaggccagaccggtgatcactgacctgttcaagaagatccctgagcagaactcgtccaagagaggcttggccgtgaacgacttcttgcaggtcaaaggcagcaacaacattttcgccattggtgacaacgcctttgccgggctgcctccaaccgcccaggtggcccaccaagaagccgagtacctggccaagaactttgacaagatggctcagatacccaatttccagaagaacctgtcctcaagaaaggataagatcgacctgctgttcgaggagaacaacttcaaacctttcaagtacaacgatctgggcgccttagcctacctgggcagcgaaagggccattgcaaccatccgttccggcaagagaaccttctacaccggcggaggcttaatgaccttctacctgtggagaattctgtacttgagcatgatcctgagcgccagaagcagactgaaggtgttcttcgactggatcaagttagcatttttcaagagggacttcttcaagggactgtga

SEQ ID NO: 104 - DNA, 1542 bp, Artificial Sequence
  source: /note="Description of Artificial Sequence: Synthetic polynucleotide"
atgctgtcgaagaatctgtatagcaacaagaggttgctgaccagcaccaataccctcgtgagattcgctagcaccagatccaccggcgtcgaaaacagcggagcaggccctaccagcttcaagaccatgaaggtcatcgaccctcagcacagcgacaaaccaaacgtgctgatactgggctcgggctggggagccattagctttctgaagcacatcgacaccaagaagtacaacgtttccatcatcagccctagaagctacttcctgtttacccccctgttaccctctgcaccagtgggaaccgtagacgaaaagtccatcattgagcccatcgtgaatttcgctctgaagaaaaaggggaacgtcacctactatgaggcagaggccacctctatcaaccccgaccggaataccgtgaccatcaagagcctgtctgccgttagccagctataccagcctgagaaccacctgggcctgcaccaggccgagcccgccgagattaagtacgactacctgatcagtgccgtgggcgccgagcccaacacctttggtatccccggcgtgactgattacggccatttcctgaaggaaatccccaactctctggaaatcagaagaaccttcgccgccaacctggagaaggccaacttattgcctaagggcgatcccgagagaagaagactactgagcattgtcgtcgttggcggtggccccacaggtgtggaggccgctggtgaactgcaggattatgtgcaccaggacctgcggaagtttctgcccgcattggccgaggaagtgcaaattcacctggtggaagccctgcccatcgtgctgaacatgttcgagaagaagcttagcagctacgcccagagccatctggaaaacacctcgatcaaggtacatctgagaaccgctgtcgccaaggtggaagagaagcagttgttggcaaagaccaagcacgaggacggcaagattaccgaggaaactatcccctacggcactctgatttgggccacgggcaacaaggcaagaccggtgatcaccgacctgttcaagaagatccccgagcaaaacagctccaagcggggattggcagtgaacgacttcctgcaggtcgagggcagcaacaacattttcgccattggtgacaacgcctttgccggcctgccaccaacagcccaggtggcgcaccaggaagccgagtacctggccaagaacttcgataaaatggcccagataccaaatttccagaagaacctgtcctcaagaaaggataagatcgacctgctgttcgaggaaaacaacttcaagcccttcaagtacaacgatctgggtgccctggcatacctgggctccgaaagggccattgcaaccatacgttccggtaagcggaccttctacaccggcggaggcctgatgaccttctacctgtggcggatcctgtacctgagcatgattctgtctgcaagaagcagactgaaggtgtttttcgactggattaaattagcattcttcaaaagagacttctttaagggattatga

SEQ ID NO: 105 - DNA, 1542 bp, Artificial Sequence
  source: /note="Description of Artificial Sequence: Synthetic polynucleotide"
atgctatcgaagaacttgtatagtaacaagcggttgctcaccagcaccaacacgctcgtgcgcttcgccagcaccagatccaccggcgtggaaaactccggggctggtcccacctctttcaagaccatgaaagtcatcgaccctcagcacagcgacaagcccaacgtgctgatactgggctctggctggggagccattagctttctgaagcacattgacaccaagaagtacaacgttagcatcatctctcctagaagctacttcttatttacgcccttgctgccctctgcacctgttgggacagtggacgagaagtcaattatcgagcccatcgtgaacttcgctctgaagaaaaagggcaacgtcacctactatgaggccgaggccacctctatcaaccccgaccggaacaccgtgaccatcaaaagcctgtctgccgtttcccagctataccaacccgagaaccacctgggcctgcaccaggcagagcccgccgaaattaagtacgactacctgatcagtgctgtaggtgccgagcctaacacatttggaattcccggggtgaccgattacggccatttcctgaaggagatccccaactctttggaaatccggcggacttttgccgccaacctagaaaaggccaacttactgcctaagggcgaccccgaaagaagaagactgctgagcatcgtcgtggtgggtggagggcctacaggcgtggaagctgctggtgaactgcaggactatgttcaccaggacctgcggaagtttctgcctgcactggccgaggaagtgcaaattcacctggtggaagctctgcccatcgttttgaacatgttcgagaagaagctgagcagctacgcccaaagccacctggaaaacacctccatcaaagtacatctgagaacggccgtcgccaaggtggaagaaaagcagctgctggcaaagaccaaacacgaagacggtaagattaccgaggaaactattccctacggtaccctgatttgggccaccggtaacaaggccagacccgtgatcactgacctgttcaagaagattcccgagcaaaactcgagcaagcggggcttggccgtgaatgacttcctgcaggtgaaaggcagcaacaacattttcgccatcggcgacaacgcatttagcggcctgcctcctaccgcccaggtggcccaccaagaggccgagtatctggccaagaacttcgacaaaatggcccagataccaaatttccagaagaatctgtcctcccggaaggataagatcgatctgttgttcgaggaaaacaacttcaagcccttcaagtacaacgacctgggcgccctggcctacctgggaagcgaaagggccattgcaaccataagaagcggtaagcggaccttctacaccggcggaggcttaatgaccttctacttatggcggattttgtacttgagcatgatcctgtctgcaagatcgagactgaaggtcttcttcgactggatcaaactggccttcttcaagagggacttcttcaaaggcctgtga

SEQ ID NO: 106 - DNA, 1542 bp, Artificial Sequence
  source: /note="Description of Artificial Sequence: Synthetic polynucleotide"
atgctaagcaagaacctgtacagcaacaagaggctgctgacctcgaccaacaccatggtcagattcgccagcaccagatccacaggcgtggaaaactccggagctggtcctaccagcttcaagaccatgaaagtcattgacccccagcacagcgacaaaccaaacgtgctgatcctgggctctgggtggggcgccatctcgtttttaaagcacatcgacaccaagaagtacaacgttagcatcatcagccccagaagctatttcctgttcacccctttgctgccttctgcaccagtgggaaccgtggacgagaagtccattatcgagcccatcgtgaattttgctctcaagaaaaagggcaacgttacctactatgaggccgaggccaccagcatcaatcccgacaggaacaccgtgaccatcaagagcctgagcgccgtgagccagctgtaccagcctgagaaccatctaggcctgcaccaagcagagcctgccgaaattaagtacgattatctgatcagtgccgtgggcgcggagcccaacacatttggtatccccggggtcaccgattacggtcatttcctgaaagagattcccaactctttggaaatcagacggaccttcgccgccaacctagagaaggccaacctgttgcctaagggtgatcccgagcggagaaggctgctgtccatcgtggtggtgggtggtggccctacaggcgtggaagccgctggtgagctacaggactacgtgcaccaggacctgagaaagttcctgcctgccttggccgaggaagtgcagattcacctggtggaagccctgcccatcgtgttgaatatgttcgagaagaagctgagctcatacgcgcaaagccacctggaaaacacttccatcaaggtacacctgagaaccgctgtcgccaaagtggaagagaagcagttgctggcaaagaccaagcacgaggacggtaaaattaccgaggaaaccattccctacggcaccctgatttgggccaccggtaacaaggccagacccgtaatcactgacctgttcaagaagatccctgagcagaacagcagcaagagaggcttggccgtgaatgacttcctgcaggtcaaaggcagcaacaacatcttcgccattggcgacaacgcatttgccggcctgccacctacagcccaggtagcccaccaagaagccgaatatttggccaagaattttgacaaaatggcccagataccaaatttccagaagaacctgtcttcccggaaggataagatcgatctgttgttcgaggaaaacaacttcaagcccttcaagtacaacgatttaggcgccttagcatacctgggcagcgaaagggccattgccaccatccgttccggtaagagaaccttctacaccggcggtggcctgatgaccttctacctgtggagaatcttgtacctgagcatgatcctgagcgcacgcagcagactgaaggtgttcttcgactggatcaaactggccttcttcaaaagggacttcttcaagggactgtga

SEQ ID NO: 107 - DNA, 1542 bp, Artificial Sequence
  source: /note="Description of Artificial Sequence: Synthetic polynucleotide"
atgctgagcaagaacctgtacagtaacaagaggctgctgaccagcacgaacacgctcgtgcgcttcgctagcaccagatccacaggggtcgaaaacagcggggcaggccccacctcttttaagaccatgaaggtcatcgaccctcagcacagcgacaaacccaacgtgctgatcctgggctctggctggggcgccatcagctttctgaagcacattgacaccaagaagtacaacgtttccatcatcagccccagaaagtacttcctgttcacgcccctgttacctagcgcacctgttggaaccgtggacgagaagtcaatcatcgagcccatcgtgaacttcgctctcaagaaaaaggggaacgtcacctactacgaggccgaagccaccagcatcaatcccgacaggaataccgttaccatcaaaagcctgtctgccgtttcccagctgtaccagcctgagaaccatctggggctgcatcaagccgaacctgctgaaattaagtacgactacctgatcagtgccgtaggtgcggaacccaacacatttggaattcctggcgtcaccgactacggtcacttcctgaaagaaatccccaactctctggaaatcagaagaaccttcgccgccaatctagaaaaggccaacctgttgcctaagggcgaccccgaacggagaaggctactgagcattgtggtcgtgggtggtggccccacaggtgtggaggccgctggcgagctacaggactatgtgcaccaggacctgcggaagttcctgcccgccctggccgaagaagtgcaaattcacttggtggaagctctgcccatcgttttgaatatgtttgagaagaagctgtcatcatacgcgcaatcacatctggaaaacacctcgatcaaagtacacctgagaaccgccgtggccaaggtggaagagaagcagctgctggcaaagaccaaacacgaggacggcaagattaccgaggaaactattccatacggcactctgatttgggccacgggcaacaaggcaagaccggtgatcaccgacctgttcaagaaaatccccgagcagaacagcagcaagagaggcttggccgtgaacgactttttgcaggtcaaaggcagcaacaacatcttcgccatcggcgacaacgcatttgccggcctgccacctaccgcccaagtggcccaccaagaagccgagtacttggccaagaatttcgacaagatggcccagataccaaatttccagaagaatctgtcctcccggaaggataagatcgacctgttgttcgaggaaaacaacttcaagcccttcaagtacaacgacttaggtgccctggcatacctgggcagcgaaagagccattgccaccatacgtagcggtaagcggaccttctacaccggcggtggcctgatgaccttctacttatggagaatcttgtacctgagcatgattctgagcgcacgcagcagattaaaggtgttcttcgactggatcaaactggcatttttcaaaagagacttcttcaaaggcctgtga

SEQ ID NO: 108 - DNA, 1542 bp, Artificial Sequence
  source: /note="Description of Artificial Sequence: Synthetic polynucleotide"
atgctgtcgaagaacctgtacagcaaccggaggctgctgacctcgaccaataccctagtccgcttcgctagcaccagatccaccggggtggaaaactccggggctggtcccacctcttttaagaccatgaaggtcatcgacccccagcacagcgacaagcccaacgtgctgatactgggctctggctggggcgccatttcgtttctgaagcacattgacaccaagaagtacaacgtcagcatcatctctcccagaagctacttcctgtttacgcccctgctgccctctgcccctgtgggaacagtagacgagaagtccatcattgagcccatcgtgaacttcgccctgaagaaaaaggggaacgttacctactacgaggcagaggccaccagcatcaaccccgaccggaacaccgtgaccatcaaaagcttaagcgccgtgtcccagctataccagcctgagaaccatctgggcctgcaccaagccgagcctgctgaaattaagtacgactatctgatcagcgccgtgggcgcggagcctaacacctttggaatccctggcgtcaccgattacggtcacttcctgaaggaaatccccaacagcttggaaatacggcggacctttgccgccaacctagagaaggccaacctgttgcctaagggcgaccccgaaagaagaaggctactgagcatcgtggtcgttggtggtgggcccacaggcgtggaggctgctggtgagctgcaggattatgtgcaccaggacctgcggaagtttctgcccgccttggccgaggaagtccaaattcacctggtggaagccctgcccatcgtgttgaatatgttcgagaagaagctgagcagctacgcgcaatcacacttagaaaacacttccatcaaagtacatctgagaaccgctgtcgccaaggtggaagagaagcagttgctggcaaagaccaagcacgaggacggcaagataaccgaggaaactatcccctacggtaccctgatttgggccacgggcaacaaggcaagaccggtaatcactgacctgttcaagaagattcccgagcagaactcgtccaagagaggactggccgtgaacgactttctgcaggtgaaaggcagcaacaacatcttcgccatcggtgacaatgcatttgccgggctgccacctaccgcccaagtagcccaccaggaggccgagtatctggccaagaacttcgacaagatggcccagatccccaatttccaaaagaacctgtcttcaagaaaggataaaatcgacctgctgttcgaggaaaacaacttcaagcctttcaagtacaacgacctgggtgccctggcctacctgggaagcgaaagagccattgccaccatacgtagcggtaagcggaccttctacaccggcggaggcttaatgaccttctacctgtggcggattttgtacctgagcatgatcctgtctgccagaagcagactgaaggtctttttcgactggatcaaactggccttcttcaaaagagacttctttaaaggcttatga

SEQ ID NO: 109 - DNA, 1542 bp, Artificial Sequence
  source: /note="Description of Artificial Sequence: Synthetic polynucleotide"
atgctgagcaagaatttgtacagcaacaagcggctgctcaccagcacgaacaccctagtgcgcttcgccagcaccagatccaccggggtcgaaaacagcggagctggccccaccagcttcaagaccatgaaagtcatcgaccctcagcacagcgacaaaccaaacgtgctgatcctgggctcggggtggggagctatctcgtttctgaagcacatcgacaccaagaagtacaacgtcagcatcatcagccccagaagctacttcttattcacccctctgttacccagcgccccagttggaaccgtggacgagaagtcaattatcgagcccatcgtgaactttgccctgaagaaaaagggcaacgtcacctactatgaggccgaggccacctctatcaaccccgacaggaataccgtgaccatcaagtcactgtctgccgttagccagctgtaccaacccgagaaccatctaggcctgcaccaggccgagcccgccgaaattaagtacgactacctgatcagcgccgtgggcgccgagcccaacacatttggaattcctggggtgaccgactacggccatttcctgaaggaaatccccaactctttggaaatccggagaaccttcgccgccaatctggaaaaggccaacctgttgcctaagggcgaccccgaacggagaaggctactgtccattgtggtcgttggtggtggccccacaggcgtggaagctgctggtgagctacaggactacgttcaccaggacctgcggaagttcttccccgccctggccgaagaagtgcaaattcacctggtggaagctctgcccatcgtgttgaacatgttcgagaagaagctgagcagctacgcgcaaagccacctggaaaacacctcgatcaaggtacacctgagaaccgccgtggccaaagtggaagagaagcaattgttggccaagaccaaacacgaagacggtaagattaccgaggaaactatcccatacggtaccttgatttgggccacgggtaacaaggcaagacccgtaatcactgaccttttcaagaaaattcccgagcaaaactcgagcaagcggggcctggcagtgaacgacttcttgcaggtgaaaggcagcaacaacattttcgccattggtgacaacgcatttgccgggctgccacctaccgcccaggtggcccaccaagaggccgagtacttggccaagaactttgacaaaatggcccagataccaaatttccaaaagaatctgtcttcacggaaggataaaatcgacctgctgttcgaggagaacaacttcaagcccttcaagtacaacgatctgggtgccttagcctacctgggctccgaaagagccattgccaccatcagaagcggtaagagaaccttctacaccggtggtggcctgatgaccttctacctgtggcggattttgtacctgagcatgatcctaagcgcaagaagcagattaaaggtgtttttcgactggattaagttagcctttttcaagagggacttcttcaagggcctgtga

SEQ ID NO: 110 - DNA, 1542 bp, Artificial Sequence
  source: /note="Description of Artificial Sequence: Synthetic polynucleotide"
atgctgagcaagaatctgtacagtaacaagcggctgctcaccagcaccaataccctagtgcgcttcgcctccaccagatccacaggcgtcgaaaacagcggggctggccccacctctttcaagaccatgaaagtcatcgaccctcagcacagcgacaagccaaacgtgctgatcctgggttctggctggggagccatttcgtttctgaagcacattgacaccaagaagtacaacgtctccatcatctctcctagaaagtatttcctgttcacgcccttgctgcccagcgccccagtgggaaccgtggacgagaagtcaattattgagcccatcgttaatttcgctctcaagaaaaagggcaacgtcacctactatgaggccgaagccacctctatcaaccccgaccggaacaccgttaccatcaagtcactgagcgccgtttcccagctgtaccagcccgagaaccacctaggcctgcaccaggccgagcctgccgagattaagtacgactacctgatcagcgctgtaggcgcggaacctaacacatttggtattcccggggtcaccgactacggtcacttcctgaaagagatccccaacagcttggaaatacggcggacctttgccgccaacctagaaaaggccaacctgctgccaaagggcgatcccgaacggagaaggctgctgagcatcgtggtggtgggtggaggccccacaggcgtggaagccgctggcgaactgcaggactacgtgcaccaggacctgcggaagtttctccccgcactggccgaggaagtgcagattcacttggtcgaagccctgcccatcgttctgaacatgttcgagaagaagctgagcagctacgcgcagtcacatctggaaaacacttccatcaaggtacatctgagaacggccgtggccaaggttgaagagaagcagttgctggcaaagaccaaacacgaggacggcaaaataaccgaagaaaccatcccctacggtactttgatttgggccaccggcaacaaggccagacccgtgatcaccgaccttttcaagaagatccccgagcagaacagctccaagagaggcctggcagtgaacgacttcctgcaggtgaaaggcagcaacaacattttcgccatcggcgacaacgcatttgccggcctgcctcctaccgcccaagtggcgcaccaggaagccgagtacctggccaagaattttgataaaatggcccaaataccaaatttccagaagaatctatcttcccggaaggataaaattgatctgctgttcgaggaaaacaacttcaagcctttcaaatacaacgacttaggtgccctggcatacctgggaagcgaaagagccattgcaaccatcagatccggtaagcggaccttttacaccggcggaggcctgatgaccttctacctgtggcggattttgtacttgtccatgattctgtctgccagaagcagactgaaggtcttcttcgactggatcaagttagcattcttcaaaagggactttttcaagggcttatga

SEQ ID NO: 111 - DNA, 1542 bp, Artificial Sequence
  source: /note="Description of Artificial Sequence: Synthetic polynucleotide"
atgctatcgaagaacctgtatagcaaccggcggctgctgacctcgaccaacaccctcgtcagattcgccagcaccagatccacaggcgtggaaaacagcggagctggtcccacaagcttcaagaccatgaaggtcattgaccctcagcacagcgacaaaccaaacgtgctgatcctgggctctggctggggagctatcagctttctgaagcacatcgacaccaagaagtacaacgtctccatcatcagccccagaagctacttcctgtttacccccctgctgcctagcgcacctgtgggaacagtagacgaaaagtccatcattgagcccatcgttaatttcgctctgaagaaaaagggcaacgtcacctactatgaggcagaagccaccagcatcaatcccgacaggaataccgtgaccataaaaagcttaagcgccgtttcccagctataccagcctgaaaaccacctgggcctgcaccaggccgaacccgccgaaattaagtacgactatctgatcagcgccgtgggtgcggaacctaacacctttggaatccctggggtgactgactacggtcatttcctgaaagaaatccccaacagcttggaaatccggagaactttcgccgccaacctggaaaaggccaacctgctgcctaagggcgaccccgagcggagaaggctgctgagcatcgtcgtggtgggcggtggccctacaggcgtggaggctgctggtgaactgcaggattatgtgcaccaggacctgagaaagtttctccccgccttggccgaggaagtccaaattcacctggtggaagctctgcccatcgttctgaacatgttcgagaagaagcttagcagctacgcccaaagccacttagaaaacacttcgatcaaagtgcacctgagaaccgctgtggccaaagtggaagagaagcagttgctggccaagaccaaacacgaagacggtaagataaccgaagaaaccatcccatacggtaccctgatttgggccaccggcaacaaggcaagacccgtaatcaccgacctgttcaagaaaattcccgagcagaacagctccaagagaggcctggcagtgaacgacttcttgcaggtcaaaggcagcaacaacattttcgccatcggtgacaacgcatttgccgggttgcctcctacagcccaagtggcccaccaggaggccgagtacctggccaagaacttcgacaagatggctcagatccccaatttccagaagaacctatcctcacggaaggataaaattgatctgctgttcgaggaaaacaacttcaagcccttcaagtacaacgatttaggtgccctggcctacctgggcagcgaaagagccattgccaccatcagaagcggtaagcggacattctacaccggcggtggcttaatgaccttctacctgtggagaatcctgtacctgagcatgatcctgtctgccagaagcagactgaaggtgttcttcgactggattaaactggcctttttcaagagagactttttcaagggattatag

SEQ ID NO: 112 - DNA, 1542 bp, Artificial Sequence
  source: /note="Description of Artificial Sequence: Synthetic polynucleotide"
atgctgtcgaagaacttgtatagtaacaagcggttgctcacctcgacgaacacgctcgtgcgcttcgctagcaccagatccacaggggtggaaaacagcggagcaggtcctaccagcttcaagaccatgaaggtcattgaccctcagcacagcgacaagccaaacgtgctgatactgggctcgggctggggcgccatctcgtttttaaagcacatcgacaccaagaagtacaacgtcagcatcatcagccctagaagctatttcctgttcacgcccctgctgcctagcgccccagttggaaccgtggacgagaagtcaatcatcgagcccatcgtgaacttcgctctgaagaaaaagggcaacgtcacctactacgaggcagaagccacctctatcaaccccgaccggaataccgtgaccatcaagagcttatctgccgtttcccagctataccagcccgaaaaccacctggggctgcatcaggccgaacctgccgagattaagtacgattacctgatcagtgctgtgggcgccgaacccaacacctttggaatccccggggtgactgactacggtcatttcctgaaagaaatccccaacagcctggaaatacggcggaccttcgccgccaacctggagaaggccaacttactgccaaagggtgaccccgaacggagaaggctactgagcattgtggtcgtgggcggtggccctactggcgtggaggccgctggtgaactgcaggattacgtgcaccaggacctgagaaagtttctgcccgcattggccgaggaagtgcagattcacctggtcgaagccctgcccatcgtgctgaacatgttcgagaaaaagctgagctcatacgcccaaagccacttagaaaacacctcgatcaaggtgcacctgagaaccgctgtggccaaggttgaagaaaagcagctgctggccaagaccaagcacgaggacggcaagataaccgaggaaactattccatacggcaccctgatttgggccaccggcaacaaggccagacccgtgatcactgaccttttcaagaagatccccgagcagaactcgagcaagagaggcttggccgtgaacgactttctgcaggtgaaaggcagcaacaacattttcgccatcggcgacaatgcctttgctggcctgccacctaccgcccaggtagcgcaccaggaagccgaatatctggccaagaatttcgataagatggctcagatccccaatttccagaagaatctatcttcccggaaggataaaatcgacctcttgttcgaggagaacaacttcaagcccttcaagtacaacgatctgggcgccctggcatacctgggctccgaaagagccattgccaccatcagaagcggcaagagaaccttttacaccggtggaggcctgatgaccttctacctgtggagaattctgtacttgagcatgattctgagcgcccgcagcagactgaaggtcttcttcgactggatcaagctggcctttttcaaaagggacttcttcgagggcttatag

SEQ ID NO: 113 - DNA, 1542 bp, Artificial Sequence
  source: /note="Description of Artificial Sequence: Synthetic polynucleotide"
atgctatcgaagaatctgtacagcaacaagcggctgctgaccagcaccaacaccctagtccgcttcgccagcaccagatccacaggggtggaaaacagcggggcaggccctacatctttcaagaccatgaaagtcatcgacccccagcacagcgacaaacccaacgtgctgatactgggttcgggctggggagccatctcgtttctgaagcacatcgacaccaagaagtacaacgtcagcatcatcagccctagaaagtatttcttattcacgcctttgctgccctctgccccagttgggaccgtggacgagaagtccatcatcgagcccatcgtgaatttcgctctgaagaaaaagggcaacgtcacctactatgaggcagaggccacctctatcaaccccgacaggaataccgttaccatcaaaagcctgtctgccgtttcccagctgtaccagcctgagaaccacctaggcctgcatcaggccgagcccgccgagattaagtacgactacttaatcagcgctgtaggtgccgagcccaacacctttggtattcccggggtgaccgattacggccacttcctgaaggaaatccccaacagcttggaaatacggcggacctttgccgccaatctagagaaggctaacttattgcctaagggcgatcccgagcggagaagactgctgtccatcgtcgtggttggtggtggccccacaggtgtagaggctgctggtgagctacaggattacgtgcaccaggacctgagaaagttcctccctgccctggccgaggaagtgcagattcacttggtggaagccctgcccatcgtgttgaatatgttcgagaagaagcttagcagctacgcccagtcacacctggaaaacacttccatcaaggtacacctgagaacggccgtcgccaaagtggaagagaagcagttgctggccaagaccaaacacgaggacggcaagattaccgaagaaactattccctacggtaccctgatttgggccaccggcaacaaggcaagacccgtgatcaccgacctgttcaagaagatccccgagcagaacagctccaagcggggcctggcagtgaacgacttcctgcaggtcaaaggcagcaacaacatcttcgccatcggcgacaatgcctttgctgggctgccaccaacagcccaggtagcgcaccaggaggccgagtatctggccaagaattttgacaagatggcccagatccccaatttccagaagaatctgtcttcccggaaggataaaattgacctgctgttcgaggaaaacaacttcaaacccttcaaatacaacgacttaggcgccctggcctacctgggaagcgaaagagccattgccaccatcagatccggcaagcggaccttctacaccggcggtggcttaatgaccttctacctgtggcggattctgtacttgtccatgatcctgagcgcacgctcgagattaaaggtgtttttcgactggatcaagctggccttcttcaagagagacttctttaagggcctgtga

SEQ ID NO: 114 - DNA, 1542 bp, Artificial Sequence
  source: /note="Description of Artificial Sequence: Synthetic polynucleotide"
atgctaagcaagaatctgtatagcaacaagcggctgctcaccagcaccaacacgctcgtcagattcgccagcaccagatccaccggggtcgaaaacagcggggctggccctacaagcttcaagaccatgaaggtcattgaccctcagcacagcgacaaacccaacgtgctgatactgggctcggggtggggcgccatttcgtttttaaagcacatcgacaccaagaagtacaacgtctccatcatcagccctagaagctatttcctgttcacgcccctgctgccctctgcccctgtgggaacagtagacgaaaagtccatcatcgagcccatcgtgaattttgccctcaagaaaaagggcaacgtcacctactacgaggcagaggccacctctatcaaccccgaccggaataccgtgaccataaagagcctgtctgccgtttcccagctgtaccaacctgagaaccacctggggctgcaccaagccgaacctgctgagattaagtacgactatttaatcagtgctgtgggtgcggagcccaacacctttggtattcctggcgtgactgactacggtcacttcctgaaagagatccccaacagcttggaaatcagaagaaccttcgccgccaacctggaaaaggccaacctgctgccaaagggcgatcccgagcggagaagactactgagcatcgtggtggtgggcggaggccccactggcgtggaggccgctggtgagctacaggactacgtgcaccaggacctgagaaagttcctgcccgccctggccgaggaagtgcagattcacctggtcgaagctctgcccatcgtgctgaatatgttcgagaagaagctgagctcatacgcccagagccacttagaaaacacctcgatcaaggtacatctgagaacggccgtggccaaggtggaagaaaagcagctgttggcaaagaccaagcacgaggacggtaaaataaccgaggaaactattccctacggcaccctgatttgggccaccggcaacaaggccagacccgtgatcactgacctgttcaagaagatccccgagcagaacagctccaagagaggactggccgtgaacgacttcttgcaggtcaaaggcagcaacaacattttcgccattggtgacaatgcctttgccggcctgcctcctacagcccaggtggcccaccaggaagccgagtacttggccaagaacttcgataagatggctcaaatcccaaatttccagaagaatctgtcttccagaaaggataagattgatctcctgttcgaggaaaacaactttaagcctttcaagtacaacgatttaggcgccctggcatacctgggaagcgaaagagccattgcaaccataagatccggtaagagaacattctacaccggtggaggcctgatgaccttctacttatggcggatcttgtacctgtccatgatcctgtctgcccgctcgagactgaaggtgttcttcgactggatcaaaatggcatttttcaagagagacttctttaagggcctgtag

SEQ ID NO: 115 - DNA, 1542 bp, Artificial Sequence
  source: /note="Description of Artificial Sequence: Synthetic polynucleotide"
atgctgagcaagaacctgtacagcaacaagcggctgctgaccagcaccaacaccctcgtgagattcgcctccaccagatccaccggcgtcgaaaacagcggggctggccccaccagcttcaagaccatgaaagtcatcgacccccagcacagcgacaagcccaacgtgctgatcctgggctctggctggggcgccatcagctttctgaagcacatcgacaccaagaagtacaacgtcagcatcatcagccccagaagctatttcctgcacacccccctgctgcccagcgcacctgtgggaacagtggacgagaagtccatcatcgagcccatcgtgaacttcgccctgaagaaaaagggcaacgtcacctactacgaggccgaggccaccagcatcaatcccgaccggaataccgtgaccatcaagagcctgagcgccgtgtcccagctgtaccagcccgagaaccacctgggcctgcaccaggccgagcctgccgagattaagtacgactacctgatcagtgccgtgggtgccgagcccaacacctttggaatccccggcgtgaccgactacggccacttcctgaaagagatccccaacagcttggaaatccggcggaccttcgccgccaacctggaaaaggccaacctgctgcctaagggtgaccccgagcggagaaggctgctgagcatcgtggtcgtgggcggtgggcccacaggtgtggaagccgctggcgagctgcaggactacgttcaccaggacctgcggaagttcctgcccgccctggccgaagaagtgcagattcacctggtggaagccctgcccatcgtgctgaacatgttcgagaagaagctgagcagctacgcccagagccacctggaaaacacctccatcaaggtgcacctgagaaccgccgtggccaaggtggaagagaagcagctgttggccaagaccaagcacgaggacggcaagattaccgaagaaaccatcccctacggcaccctgatttgggccaccggcaacaaggccagacccgtgatcactgacctgttcaagaagatccccgagcagaacagcagcaagcggggcctggccgtgaacgacttcctgcaggtcaaaggcagcaacaacatcttcgccatcggcgacaacgcctttgccggcctgcctcctacagcccaggtagcccaccaggaagccgaatacctggccaagaactttgacaagatggcccaaatccccaatttccagaagaacctgtcctcccggaaggataagatcgacctgctgttcgaggaaaacaacttcaagcccttcaaatacaacgacctgggcgccctggcctacctgggcagcgaaagagccattgccaccatcagaagcggcaagcggaccttttacaccggcggaggcctgatgaccttctacctgtggcggatcctgtacctgagcatgatcctgagcgcccgcagcagactgaaggtgttcttcgactggattaagctggccttcttcaagagggacttcttcaagggcctgtga

SEQ ID NO: 116 - DNA, 1542 bp, Artificial Sequence
  source: /note="Description of Artificial Sequence: Synthetic polynucleotide"
atgctgagcaagaacctgtacagcaacaagcggctgctgaccagcaccaacaccctcgtgcgcttcgccagcaccagatccaccggggtcgaaaacagcggagctggccccaccagcttcaagaccatgaaggtcatcgacccccagcacagcgacaagccaaacgtgctgatcctgggctcgggctggggcgccattagctttctgaagcacatcgacaccaagaagtacaacgtcagcatcatcagccccagaagctacttcctgttcacccccctgctgcccagcgcccctgtgggaaccgtggacgagaagtccatcattgagcccatcgtgaacttcgccctgaagaaaaagggcaacgtcacctactacgaggccgaagccaccagcatcaaccccgaccggaacaccgttaccataaagagcctgagcgccgtgtcccagctgtaccagcccgagaaccacctgggcctgcaccaggccgagcccgccgagattaagtacgactacctgatcagcgccgtgggcgccgaacccaacacctttggaatccccggcgtgaccgactacggccacttcctgaaagagatccccaacagcttggaaatccggcggaccttcgccgccaacctggaaaaggccaacctgctgcctaagggcgaccccgagcggagaaggctgctgagcatcgtggtcgtgggtggaggccccacaggcgtggaagctgctggtgagctgcaggactacgtgcaccaggacctgcggaagttcctgcccgccctggccgaggaagtccagattcacctggtggaagccctgcccatcgtgttgaacatgttcgagaagaagctgagcagctacgcgcagagccatctggaaaacacctccatcaaggtgcacctgagaaccgccgtggccaaggtggaagagaagcagctgctggccaagaccaagcacgaggacggcaagataaccgaggaaaccatcccctacggcaccttgatttgggccaccggcaacaaggcaagacccgtgatcaccgacctgttcaagaagatccctgagcaaaacagcagcaagcggggactggccgtgaacgactttctgcaggtcaaaggcagcaacaacatcttcgccatcggcgacaatgcctttagcggcctgcctcctacagcccaagtggcccaccaggaagccgagtacctggccaagaacttcgacaagatggctcagatccccaatttccagaagaacctgtcctcccggaaggataagatcgacctgctgttcgaggaaaacaacttcaagcccttcaagtacaacgatctgggcgccctggcctacctgggcagcgaaagagccattgccaccatcagaagcggcaagcggaccttctacaccggcggaggcctgatgaccttctacctgtggcggatcctgtacctgagcatgatcctgagcgcccgcagcagactgaaggtgttcttcgactggatcaagctggccttcttcaaaagggacttcttcaagggcctgtga

SEQ ID NO: 117 - DNA, 1542 bp, Artificial Sequence
  source: /note="Description of Artificial Sequence: Synthetic polynucleotide"
atgctaagcaagaacctgtacagcaacaagcggctgctgaccagcaccaacaccctcgtgcgcttcgccagcaccagatccacaggcgtcgaaaacagcggggctggccccacaagcttcaagaccatgaaggtcatcgacccccagcacagcgacaagccaaacgtgctgatcctgggctctggctggggagccatcagctttttaaagcacatcgacaccaagaagtacaacgtcagcatcatcagccccagaagctacttcctgttcacccccctgctgcccagcgcccctgtggggaccgtggacgagaagtccattatcgagcccatcgtgaacttcgctctgaagaaaaagggcaacgttacctactacgaggcagaggccaccagcatcaaccccgaccggaacaccgtgaccatcaagagcctgagcgccgtgtcccagctgtaccagcccgagaaccacctgggcctgcaccaagccgagcccgccgaaattaagtacgactacctgatcagcgccgtgggcgccgagcccaacacctttggaatccccggcgtgaccgactacggccacttcctggaggagatccccaacagcctggaaatccggcggaccttcgccgccaacctggaaaaggccaacctgctgcctaagggcgaccccgagcggagaaggctgctgagcatcgtggtcgtgggcggaggccccacaggcgtggaagctgctggcgagctgcaggattacgtgcaccaggacctgcggaagttcctgcccgccctggccgaggaagtgcagattcacctggtggaagccctgcccatcgtgctgaacatgttcgagaagaagctttcaagctacgcccagtcacacttagaaaacacctccatcaaggtgcacctgagaaccgccgtggccaaggtggaagagaagcagctgctggccaagaccaagcacgaggacggcaagattaccgaggaaaccatcccatacggcactctgatttgggccaccggcaacaaggcaagacccgtgatcactgacctgttcaagaagatccccgagcagaactcgagcaagcggggcctggccgtgaacgacttcctgcaggtcaaaggcagcaacaacatcttcgccatcggtgacaacgcctttgccggcctgcctcctacagcccaggtggcccaccaggaagccgagtacctggccaagaacttcgacaagatggcccagatccccaatttccagaagaacctgtcttcccggaaggataagatcgacctgctgttcgaggaaaacaacttcaagcccttcaagtacaacgacctgggcgccctggcatacctgggcagcgaaagagccattgccaccatcagaagcggcaagcggaccttctacaccggcggaggcttaatgaccttctacctgtggcggatcttgtacctgagcatgatcctgagcgcccgcagcagactgaaggtgttcttcgactggatcaagctggccttcttcaagagggactttttcaagggcctgtga

SEQ ID NO: 118 - DNA, 1542 bp, Artificial Sequence
  source: /note="Description of Artificial Sequence: Synthetic polynucleotide"
atgctaagcaagaacctgtacagcaacaagcggctgctgaccagcaccaacaccctcgtgcgcttcgcctccaccagatccaccggcgtcgaaaacagcggggctggccccacctctttcaagaccatgaaggtcatcgacccccagcacagcgacaagcccaacgtgctgatcctgggctctggctggggagccatcagctttctgaagcacattgacaccaagaagtacaacgtcagcatcatctctcccagaagctacttcctgtttacccccctgctgcccagcgcacctgtgggaaccgtggacgagaagtccatcatcgagcccatcgtgaactttgccctgaagaaaaagggcaacgttacctactacgaggccgaggccaccagcatcaaccccgaccggaacaccgtgaccatcaagagcctgagcgccgtgtcccagctataccagcccgagaaccacctgggcctgcaccaggccgagcccgccgagattaagtacgactacctgatcagcgccgtgggcgccgagcccaacacctttggaatccctggcgtgaccgactacggccacttcctggaggagatccccaacagcctggaaatccggcggacctttgccgccaacctggaaaaggccaacctgctgcctaagggcgatcccgagcggagaaggctgctgagcatcgtggtcgtgggcggaggccccacaggcgtggaagctgctggcgagctgcaggattacgtgcaccaggacctgcggaagttcctgcccgccctggccgaggaagtgcagattcacctggtggaagccctgcccatcgtgctgaacatgttcgagaagaagctgagcagctacgcccagagccatctggaaaacacctccatcaaagtgcacctgagaaccgccgtggccaaggtggaagagaagcagctgctggcaaagaccaagcacgaagacggcaagattaccgaggaaaccatcccctacggcactctgatttgggccaccggcaacaaggccagacccgtgatcaccgacctgttcaagaagatccccgagcagaacagcagcaagcggggcctggcagtgaacgacttcctgcaggtcaaaggcagcaacaacatcttcgccatcggcgacaacgcctttgccggcctgccacctacagcccaagtggcccaccaagaagccgagtacctggccaagaacttcgacaagatggcccaaatccccaatttccagaagaacctgtcctcccggaaggataagatcgatctgctgttcgaggaaaacaacttcaaacccttcaagtacaacgacctgggcgccctggcatacctgggcagcgaaagagccattgccaccatcagaagcggcaagcggaccttctacaccggcggaggcctgatgaccttctacctgtggcggatcctgtacctgagcatgatcctgagcgcccgcagcagactgaaggtgttcttcgactggatcaagctggccttcttcaaaagggacttcttcaagggcctgtga

SEQ ID NO: 119 - DNA, 1542 bp, Artificial Sequence
  source: /note="Description of Artificial Sequence: Synthetic polynucleotide"
atgctgagcaagaacctgtacagcaacaagcggctgctcaccagcaccaacaccctcgtgcgcttcgccagcaccagatccaccggcgtcgaaaacagcggggctggccccaccagctttaagaccatgaaggtcatcgacccccagcacagcgacaagcccaacgtgctgatcctgggctctggctggggagccatcagctttctgaagcacatcgacaccaagaagtacaacgtcagcatcatcagccccagaagctacttcctgttcacccccctgctgcccagcgcccctgttggaaccgtggacgagaagtccatcatcgagcccatcgtgaatttcgccctgaagaaaaaggggaacgtcacctactacgaggccgaggccaccagcatcaaccccgaccggaacaccgtgaccatcaagaacctgagcgccgtttcccagctgtaccagcccgaaaaccacctgggcctgcaccaggccgaacctgctgagattaagtacgactacctgatcagcgccgtgggcgccgagcccaacacctttggtatccccggcgtgactgactacggccacttcctgaaagagattcccaacagcctggaaatccggcggaccttcgccgccaacctagaaaaggccaacctgctgcctaagggcgaccccgagcggagaaggctgctgagcatcgtggtcgtgggcggaggccccacaggcgtggaagccgctggcgagctgcaggactacgtgcaccaggacctgcggaagttcctgcccgccctggccgaggaagtgcagattcacctggtggaagccctgcccatcgtgctgaacatgttcgagaagaagctgagctcatacgcccagagccacctggaaaacacctccatcaaggtgcacctgagaaccgccgtggccaaggtggaagaaaagcagctgctggccaagaccaagcacgaggacggcaagattaccgaggaaaccatcccctacggcaccctgatttgggccaccggcaacaaggccagacccgtgatcaccgacctgttcaagaagatccccgagcagaacagcagcaagcggggactggccgtgaacgacttcttgcaggtcaaaggcagcaacaacatcttcgccatcggcgacaacgcctttgccggcctgcctcctacagcccaggtggcccaccaggaagccgagtacctggccaagaacttcgacaagatggcccaaatccccaatttccagaagaacctgtcctccagaaaggataagatcgacctgctgttcgaggaaaacaacttcaagcccttcaagtacaacgacctgggcgccctggcctacctgggctccgaaagagccattgccaccataagaagcggcaagcggacattttacaccggcggaggcctgatgaccttctacctgtggcggatcttgtacctgagcatgatcctgagcgcacgcagcagactgaaggtgttcttcgactggatcaagttagccttcttcaagagggacttcttcaagggcctgtga

SEQ ID NO: 120 - DNA, 1542 bp, Artificial Sequence
  source: /note="Description of Artificial Sequence: Synthetic polynucleotide"
atgctgagcaagaacctgtacagcaacaagcggttgctgaccagcaccaacaccctcgtgcgcttcgccagcaccagatccaccggcgtcgaaaacagcggggctggccccaccagcttcaagaccatgaaggtcatcgacccccagcacagcgacaaacccaacgtgctgatcctgggctctggctggggcgccatcagctttttaaagcacatcgacaccaagaagtacaacgtcagcatcatcagccccagaagctacttcctgcacacccccctgctgcccagcgcccctgtgggaaccgtggacgagaagtccatcatcgagcccatcgtgaacttcgccctgaagaaaaagggcaacgtcacctactacgaggccgaggccaccagcatcaaccccgaccggaacaccgtgaccatcaagagcctgagcgccgtgtcccagctgtaccagcccgagaaccatctgggcctgcaccaggccgaacccgccgagattaagtacgactacctgatcagcgccgtgggcgccgagcccaacacctttggaatccccggcgtgaccgactacggccacttcctgaaagagatccccaacagcctggaaatccggagaacctttgccgccaacctggaaaaggccaacctgttgccaaagggcgaccccgagcggagaaggctactgagcatcgtggtcgtgggcggaggccccacaggcgtggaagccgctggcgagctgcaggactacgttcaccaggacctgcggaagttcctgcccgccctggccgaagaagtgcagattcacttggtggaagccctgcccatcgtgctgaacatgttcgagaagaagctgagcagctacgcccagtcacacctggaaaacacttccatcaaggtgcacctgagaaccgccgtggccaaggtggaagagaagcagctgctggccaagaccaagcacgaggacggcaagataaccgaggaaaccatcccctacggcaccctgatttgggccaccggcaacaaggccagaccggtgatcaccgacctgttcaagaagatccccgagcagaacagcagcaagcggggcctggccgtgaacgactttctgcaggtcaaaggcagcaacaacatcttcgccatcggcgacaacgcatttgccggcctgcctcctacagcccaagtagcccaccaggaagccgagtacctggccaagaacttcgacaagatggctcagatccccaatttccagaagaacctgtcctcccggaaggataagatcgatctgctgttcgaggaaaacaacttcaagcccttcaagtacaacgatctgggcgccctggcctacctgggcagcgaaagggccattgcaaccatcagaagcggcaagcggaccttctacaccggcggaggcttaatgaccttctacctgtggcggatcctgtacctgagcatgatcctgagcgcccgcagcagactgaaggtgttcttcgactggatcaagctggccttcttcaagagggacttcttcaagggactgtga

SEQ ID NO: 121 - DNA, 1542 bp, Artificial Sequence
  source: /note="Description of Artificial Sequence: Synthetic polynucleotide"
atgctgagcaagaacctgtacagcaacaagcggctgctgaccagcaccaacaccctcgtgcgcttcgccagcaccagatccaccggcgtggaaaacagcggggctggccctaccagcttcaagaccatgaaagtcatcgacccccagcacagcgacaagcccaacgtgctgatcctgggctctggctggggagctatcagctttctgaagcacatcgacaccaagaagtacaacgtcagcatcatcagccccagaagctacttcctgtttacccccctgctgcccagcgcacctgtgggaaccgtggacgaaaagtccatcatcgagcccatcgtgaacttcgccctgaagaaaaagggcaacgtcacctactacgaggcagaggccaccagcatcaaccccgaccggaacaccgtgaccataaagagcctgagcgccgtttcccagctgtaccagcccgagaaccacctaggcctgcaccaggccgagcccgccgaaattaagtacgactacctgatcagcgccgtgggtgccgagcccaacacctttggaatccccggcgtgaccgactacggccacttcctgaaagagatccccaacagcctggaaatccggcggaccttcgccgccaacctggaaaaggccaacctgctgcctaagggcgaccccgagcggagaaggctgctgagcatcgtggtcgtgggcggaggccccacaggcgtggaagctgctggcgagctgcaggactacgtgcaccaggacctgcggaagttcttccccgcactggccgaggaagtgcagattcacctggtggaagccctgcccatcgtgctgaacatgttcgagaagaagctgagcagctacgcccagagccacctggaaaacacctccatcaaggtgcatctgagaaccgccgtggccaaggtggaagaaaagcagctgttggccaagaccaagcacgaggacggcaagattaccgaggaaaccatcccctacggcaccctgatttgggccaccggcaacaaggccagaccggtgatcaccgacctgttcaagaaaattcccgagcagaacagcagcaagcggggcctggccgtgaacgacttcctgcaggtcaaaggcagcaacaacatcttcgccatcggcgacaacgcctttgccggcctgccacctacagcccaggtggcccaccaggaagccgaatacctggccaagaacttcgacaagatggcccagatacccaatttccagaagaacctgtcctcccggaaggataagatcgacctgctgttcgaggaaaacaacttcaagcccttcaagtacaacgacctgggtgccctggcctacctgggctccgaaagagccattgccaccatcagaagcggcaagagaaccttctacaccggcggaggcctgatgaccttctacctgtggcggatcctgtacctgagcatgatcctgagcgcccgcagcagactgaaggtgttcttcgactggatcaagctggccttcttcaagagggactttttcaaaggcctgtga

SEQ ID NO: 122 - DNA, 1542 bp, Artificial Sequence
  source: /note="Description of Artificial Sequence: Synthetic polynucleotide"
atgctgagcaagaacctgtacagcaacaagcggttgctgaccagcaccaacaccctcgtgagattcgccagcaccagatccaccggcgtcgaaaacagcggggctggccccaccagcttcaagaccatgaaggtcatcgacccccagcacagcgacaagcccaacgtgctgatcctgggctcgggctggggcgccatcagctttctgaagcacatcgacaccaagaagtacaacgtcagcatcatcagccctagaagctatttcctgttcacccccctgctgcccagcgcccctgtgggaaccgtggacgagaagtccatcatcgagcccatcgttaatttcgccctgaagaaaaagggcaacgtcacctactacgaggccgaggccaccagcatcaaccccgaccggaacaccgtgaccatcaagagcctgagcgccgtgagccagctgtaccagcccgagaaccacctgggcctgcaccaggccgagcccgccgagattaagtacgactacctgatcagcgctgtgggcgccgagcccaacacctttggaatccccggcgtgaccgactacggccatttcctgaaagagatccccaacagcctggaaatccggcggaccttcgccgccaacctggaagaggccaacttactgcctaagggtgaccccgagcggagaaggctgctgagcatcgtggtcgttggcggtggccccacaggcgtagaagctgctggcgagctgcaggactacgtgcaccaggacctgcggaagttcctgcccgccctggccgaggaagtgcagattcacctggtggaagccctgcccatcgtgctgaacatgttcgagaagaagcttagcagctacgcccagagccacctggaaaacacctccatcaaggtgcatctgagaacggccgtggccaaggtggaagagaagcagctgctggccaagaccaagcacgaggacggcaagattaccgaggaaaccatcccctacggcaccctgatttgggccaccggcaacaaggccagaccggtgatcaccgacctgttcaagaagatccccgagcagaacagcagcaagcggggcctggccgtgaacgactttttgcaggtcaaaggcagcaacaacatcttcgccatcggcgacaacgcctttgccggcctgcctcctacagcccaggtggcccaccaggaagccgagtacctggccaagaatttcgacaagatggcccagatccccaatttccagaagaacctgtcttcccggaaggataagatcgacctgctgttcgaggaaaacaacttcaaacccttcaagtacaacgatctgggcgccctggcctacctgggcagcgaaagagccattgccaccatcagaagcggcaagcggaccttctacaccggcggaggcctgatgaccttctacctgtggcggatcctgtacctgagcatgatcctgagcgcccgcagcagattaaaggtgttcttcgactggatcaagttagccttcttcaagagagacttcttcaagggcctgtag

SEQ ID NO: 123 - DNA, 1542 bp, Artificial Sequence
  source: /note="Description of Artificial Sequence: Synthetic polynucleotide"
atgctgagcaagaacctgtacagcaacaagcggctgctgaccagcaccaacacgctcgtccgcttcgccagcaccagatccaccggcgtcgaaaacagcggggctggccccacctctttcaagaccatgaaggtcatcgacccccagcacagcgacaagcccaacgtgctgatcctgggctctggctggggcgccatcagctttctgaagcacatcgacaccaagaagtacaacgtctccatcatcagccccagaagctacttcctgttcacccccttgctgcccagcgcccctgtggggaccgtggacgaaaagtccatcatcgagcccatcgttaacttcgccctgaagaaaaagggcaacgtcacctactacgaggccgaggccaccagcatcaaccccgaccggaacaccgtgaccatcaagagcctgagcgccgtgtcccagctgtaccagcccgagaaccacctgggcatgcaccaggccgagcccgccgagattaagtacgactacttaatcagcgccgtgggcgcggagcccaacacctttggaatccctggcgtgactgactacggccacttcctgaaagaaatccccaacagcctggaaatccggcggaccttcgccgccaacctggaaaaggccaacctgctgcctaagggtgaccccgagcggagaaggctgctgagcatcgtggtcgtgggcggaggccccacaggcgtggaggctgctggcgagctgcaggactacgtgcaccaggacctgcggaagttcctgcccgccctggccgaggaagtccagattcacctggtggaagccctgcccatcgtgctgaacatgtttgagaagaagctgagcagctacgcccaaagccacctggaaaacacctccatcaaagtgcacctgagaaccgctgtggccaaagtggaagagaagcagttgctggccaagaccaagcacgaggacggcaagattaccgaggaaaccatcccctacggcaccctgatttgggccaccggcaacaaggccagacccgtgatcaccgacctgttcaagaagatccccgagcagaacagcagcaagcggggcctggccgtgaacgacttcctgcaggtcaaaggcagcaacaacatcttcgccatcggtgacaatgcctttgccggcctgcctcctacagcccaggtggcccaccaggaagccgagtacctggccaagaacttcgacaagatggcccagatacccaatttccagaagaacctgtcctcccggaaggataagatcgatctgctgttcgaggaaaacaacttcaagcccttcaagtacaacgatctgggcgccctggcctacctgggcagcgaaagagccattgccaccatcagaagcggcaagcggaccttctacaccggcggaggcctgatgaccttctacctgtggcggatcctgtacttgagcatgatcctgagcgcccgcagcagactgaaggtgttcttcgactggatcaagctggcattcttcaagagggacttcttcaagggcctgtga

SEQ ID NO: 124 - DNA, 1542 bp, Artificial Sequence
  source: /note="Description of Artificial Sequence: Synthetic polynucleotide"
atgctaagcaagaacctgtacagcaacaagcggctgctgaccagcacgaacaccctcgtgagattcgccagcaccagatccaccggcgtcgaaaacagcggggctggccccaccagcttcaagaccatgaaggtcatcgacccccagcacagcgacaaacccaacgtgctgatcctgggctctggctggggcgctatcagctttttaaagcacatcgacaccaagaagtacaacgtcagcatcatctctcctagaagctatttcctgttcacccccctgctgcccagcgcccctgtgggaaccgtggacgagaagtccatcatcgagcccatcgtgaacttcgccctgaagaaaaaggggaacgtcacctactacgaggccgaggccaccagcatcaaccccgaccggaacaccgtgaccatcaagagcctgagcgccgtgtcccagctataccagcccgagaaccacctaggcctgcaccaggccgagcccgccgagattaagtacgattacctgatcagcgccgtgggcgccgaacccaacacctttggaatccctggcgtgaccgactacggccacttcctgaaagagatccccaacagcttggaaatccggcggaccttcgccgccaatctggaaaaggccaacctgctgccaaagggcgaccccgagcggagaaggctgctgagcatcgtggtcgtgggcggagggcccacaggcgtggaagccgctggcgagctgcaggactacgtgcaccaggacctgcggaagttcctgcccgccctggccgaggaagtgcagattcacttggtggaagccctgcccatcgtgctgaacatgttcgagaagaagctgagcagctacgcccagagccacctggaaaacacctcgatcaaggtgcacctgagaaccgccgtggccaaggtggaagagaagcagttgctggccaagaccaagcacgaggacggcaagattaccgaggaaaccatcccctacggcaccctgatttgggccaccggcaacaaggccagacccgtgatcaccgacctgttcaagaagatccccgagcagaacagcagcaagcggggcctggccgtgaacgacttcctgcaggtcaaaggcagcaacaacatcttcgccatcggcgacaatgcatttgccggcctgcctccaacagcccaggtggcccaccaggaagccgagtacctggccaagaacttcgacaagatggcccagatccccaatttccagaagaacctgtcctcccggaaggataagatcgacctgctgttcgaggaaaacaacttcaagcccttcaagtacaacgatctgggcgccctggcctacctgggcagcgaaagagccattgccaccatcagaagcggcaagcggaccttctacaccggcggaggcctgatgaccttctacctgtggcggatcctgtacctgagcatgatcctgagcgcccgcagcagactgaaggtgttcttcgactggatcaagatggccttcttcaagagggacttcttcaagggcctgtag

SEQ ID NO: 125 - DNA, 1542 bp, Artificial Sequence
  source: /note="Description of Artificial Sequence: Synthetic polynucleotide"
atgctgagcaagaacctgtatagcaacaagcggctgctgaccagcaccaacaccctcgtgcgcttcgccagcaccagatccaccggcgtcgaaaacagcggggctggccctaccagctttaagaccatgaaggtcatcgacccccagcacagcgacaagcccaacgtgctgatcctgggctctgggtggggcgctatcagctttctgaagcacatcgacaccaagaagtacaacgtcagcatcatcagccccagaagctatttcctgcacacccccctgctgcccagcgcccctgtgggaacagtggacgagaagtcaatcatcgagcccatcgtgaacttcgccctcaagaaaaagggcaacgtcacctactacgaggccgaggccaccagcatcaaccccgaccggaacaccgtgaccatcaagagcctgagcgccgtgagccagctgtaccagcccgagaaccatctgggcctgcaccaggccgaacccgccgagattaagtacgactacctgatcagcgccgtgggcgccgagcccaacacctttggtatccccggcgtgaccgactacggccatttcctgaaagaaatccccaacagcctggaaatccggcggaccttcgccgccaacctggaaaaggccaacctgctgcctaagggcgaccccgagcggagaaggctgctgagcatcgtggtggtgggcggaggccccacaggcgtggaagctgctggcgagctgcaggactacgtgcaccaggacctgcggaagttcctgcccgccctggccgaggaagtgcaaattcacttggtggaagctctgcccatcgtgctgaacatgttcgagaagaagctgagctcatacgcccagagccacctggaaaacacctccatcaaggtgcacctgagaaccgccgtggccaaggtggaagagaagcagctgctggccaagaccaagcacgaggacggtaagattaccgaggaaaccatcccctacggcaccctgatttgggccaccggtaacaaggccagacccgtgatcaccgacctgttcaagaagatccccgagcagaacagcagcaagcggggcctggcagtgaacgacttcctgcaggtcaaaggcagcaacaacatcttcgccatcggcgacaacgcatttgctgggctgcctcctacagcccaggtggcccaccaagaagccgagtacctggccaagaacttcgacaagatggcccagatccccaatttccagaagaacctgtcctcccggaaggataagatcgacctgctgttcgaggaaaacaacttcaagcccttcaagtacaacgacctgggcgccctggcatacctgggcagcgaaagagccattgcaaccatcagaagcggcaagcggaccttctacaccggcggaggcctgatgaccttctacctgtggcggatcctgtacctgagcatgatcctgagcgcccgcagcagactgaaggtgttcttcgactggatcaagctggccttcttcaagagggacttcttcaagggcctgtga

SEQ ID NO: 126 - DNA, 1542 bp, Artificial Sequence
  source: /note="Description of Artificial Sequence: Synthetic polynucleotide"
atgctgtcgaagaacctgtacagcaacaagcggctgctgaccagcaccaacaccctcgtgcgcttcgccagcaccagatccaccggcgtcgaaaacagcggggctggccccaccagcttcaagaccatgaaggtcatcgaccctcagcacagcgacaagcccaacgtgctgatcctgggctctggctggggcgccatctcgtttctgaagcacatcgacaccaagaagtacaacgtcagcatcatcagccccagaaagtacttcctgttcacgcccttgctgcccagcgcccctgtgggaaccgtggacgagaagtccattatcgagcccatcgtgaacttcgccctgaagaaaaagggcaacgtcacctactacgaggccgaggccaccagcatcaaccccgaccggaacaccgtgaccatcaagagcctgagcgccgtgtcccagctgtaccaacccgaaaaccatctgggcctgcaccaggccgagcccgccgagattaagtacgactacctgatcagcgccgtgggcgccgagcccaacacatttggtatccccggcgtgaccgactacggccacttcctgaaagaaatccccaacagcctggaaatccggcggaccttcgccgccaacctggagaaggccaacctgctgcctaagggcgatcccgagcggagaaggctgctgagcatcgtggtcgtgggcggaggccccacaggcgtggaagctgctggcgagctgcaggactacgtgcaccaggacctgcggaagttcctgcccgccctggccgaggaagtgcagattcacctggtggaagccctgcccatcgtgctgaacatgttcgagaagaagcttagcagctacgcccagagccacctggaaaacacctccatcaaagtgcacctgagaaccgccgtggccaaggtggaagagaagcagctgctggcaaagaccaagcacgaggacggcaagattaccgaggaaactatcccctacggcaccctgatttgggccaccggtaacaaggccagacccgtgatcaccgacctgttcaagaagattcccgagcagaacagctccaagcggggcctggccgtgaacgacttcctgcaggtcaaaggcagcaacaacatcttcgccatcggcgacaacgcctttgccggcctgcctcctacagcccaggtggcccaccaggaagccgagtacctggccaagaacttcgacaagatggcccagatccccaatttccagaagaacctgtcctcacggaaggataagatcgacctgctgttcgaggaaaacaacttcaagcccttcaagtacaacgacctgggcgccctggcctacctgggcagcgaaagagccattgccaccatcagaagcggcaagagaaccttctacaccggcggaggcctgatgaccttctacctgtggagaatcctgtacctgagcatgatcctgagcgccagaagcagactgaaggtgttcttcgactggattaagttagccttcttcaagagagacttctttaagggcctgtga

SEQ ID NO: 127 - DNA, 1542 bp, Artificial Sequence
  source: /note="Description of Artificial Sequence: Synthetic polynucleotide"
atgctgagcaagaacctgtacagcaacaagcggctgctgaccagcaccaataccctagtgcgcttcgccagcaccagatccaccggcgtcgaaaacagcggagctggccccaccagctttaagaccatgaaggtcatcgacccccagcacagcgacaaacccaacgtgctgatcctgggctctggctggggagccatcagctttctgaagcacattgacaccaagaagtacaacgtcagcatcatcagccccagaagctacttcctgttcacccccctgctgcccagcgccccagttggaaccgtggacgagaagtccatcatcgagcccatcgtgaacttcgccctgaagaaaaagggcaacgtcacctactacgaggccgaggccaccagcatcaaccccgacaggaacaccgtgaccatcaagtcactgtctgccgtgtcccagctgtaccaacctgagaaccacctgggcctgcaccaggccgagcccgccgagattaagtacgactacctgatcagcgccgtgggcgccgagcccaacacctttggaatccccggcgtgaccgactacggccacttcttcaaagagattcccaacagcctggaaatccggcggaccttcgccgccaacctggaaaaggctaacctgctgcctaagggcgaccccgagcggagaagactgctgagcatcgtggtcgtgggcggaggccccacaggcgtggaagctgctggcgagctgcaggactacgtgcaccaggacctgcggaagttcctgcccgccctggccgaggaagtgcagattcacctggtcgaagccctgcccatcgtgctgaacatgtttgagaagaagctgagctcatacgcgcagagccacctggaaaacacctccatcaaggtacacctgagaaccgccgtggccaaggtggaagagaagcagctgctggccaagaccaagcacgaggacggcaagattaccgaggaaaccatcccctacggtaccctgatttgggccaccggcaacaaggccagacccgtgatcaccgacctgttcaagaagatccccgagcagaacagcagcaagcggggcctggccgtgaacgacttcctgcaggtcaaaggcagcaacaacatcttcgccatcggcgacaacgcctttgccggcctgcctccaacagcccaggtggcccaccaggaagccgagtacctggccaagaacttcgacaagatggcccagatccccaatttccagaagaacctgtcctcccggaaggataagatcgacctgctgttcgaggaaaacaacttcaagcccttcaagtacaacgacttaggcgccctggcctacctgggcagcgaaagagccattgccaccatcagaagcggcaagcggaccttttacaccggcggaggcctgatgaccttctacctgtggagaatcctgtacctgagcatgatcctgagcgcacgctcgagactgaaggtgttcttcgactggatcaagctggccttcttcaagagggacttcttcaagggcctgtga

SEQ ID NO: 128 - DNA, 1542 bp, Artificial Sequence
  source: /note="Description of Artificial Sequence: Synthetic polynucleotide"
atgctgagcaagaacctgtacagcaaccggcggctgctgaccagcaccaacaccctcgtccgcttcgccagcaccagatccaccggcgtcgaaaacagcggggcaggccccaccagcttcaagaccatgaaggtcatcgacccccagcacagcgacaagcccaacgtgctgatcctgggctctgggtggggcgccatcagctttctgaagcacatcgacaccaagaagtacaacgtcagcatcatcagccctagaagctacttcctgttcacccccctgctgcccagcgcccctgtgggaaccgtggacgagaagtccatcatcgagcccatcgtgaacttcgccctgaagaaaaagggcaacgtcacctactacgaggccgaggccacctctatcaaccccgaccggaataccgtgaccatcaagagcttaagcgccgtgtcccagctgtaccagcccgaaaaccacctgggcctgcaccaggccgaacccgccgagattaagtacgattacttaatcagcgccgtgggtgccgaacccaacacctttggaatccccggcgtcaccgattacggccacttcctgaaagagatccccaactctctggaaatacggagaaccttcgccgccaacctggaaaaggccaacctgctgcctaagggcgaccccgagcggagaaggctgctgagcatcgtggtcgtgggcggtggccccacaggcgtggaagctgctggcgagctgcaggactacgtgcaccaggacctgcggaagttcctgcccgccctggccgaggaagtgcagattcacctggtggaagccctgcccatcgttctgaacatgttcgagaagaagctgagcagctacgcccagagccacctggaaaacacctccatcaaggtgcacctgagaaccgccgtggccaaggtggaagagaagcagctgctggcaaagaccaagcacgaggacggcaagattaccgaggaaaccatcccctacggcaccctgatttgggccaccggcaacaaggccagacccgtgatcaccgacctgttcaagaaaatccccgagcaaaacagcagcaagcggggcctggccgtgaacgacttcctgcaggtcaaaggcagcaacaacatcttcgccatcggcgacaacgcctttgccggcctgcctcctacagcccaggtggcccaccaagaagccgagtacctggccaagaacttcgacaagatggcccagatccccaatttccagaagaacctgtcctcccggaaggataagatcgacctgctgttcgaggagaacaacttcaagcccttcaagtacaacgacctgggcgccctggcctacctgggaagcgaaagagccattgccaccatcagaagcggcaagcggaccttctacaccggcggaggcctgatgaccttctacctgtggagaatcctgtacctgagcatgatcctgagcgcccgcagcagactgaaggtgttcttcgactggatcaaattagccttcttcaagagggacttcttcaagggcctgtga

SEQ ID NO: 129 - DNA, 1542 bp, Artificial Sequence
  source: /note="Description of Artificial Sequence: Synthetic polynucleotide"
atgctgagcaagaacctgtacagcaacaagcggctgctgaccagcaccaacaccctcgtgcgcttcgccagcaccagatccaccggcgtcgaaaacagcggggctggccccaccagcttcaagaccatgaaggtcatcgaccctcagcacagcgacaaacccaacgtgctgatcctgggctctggctggggagccatcagctttctgaagcacatcgacaccaagaagtacaacgtcagcatcatcagccccagaagctacttcctgttcacgcccctgctgcccagcgcccctgtgggaaccgtggacgagaagtccatcatcgagcccatcgtgaacttcgccctgaagaaaaagggcaacgtcacctactacgaggccgaggccaccagcatcaaccccgaccggaacaccgtgaccatcaagaacctgagcgccgtgtcccagctgtaccagcctgagaaccacctgggcctgcaccaggccgagcccgccgagattaagtacgactacctgatcagcgccgtgggcgccgagcccaacacctttggaatccccggcgtcaccgactacggccacttcctgaaagagatccccaacagcctggaaatccggcggaccttcgccgccaacctggaaaaggccaacctgctgcctaagggtgatcccgagcggagaaggctgctgagcatcgtggtcgtgggcggagggcctacaggcgtggaagctgctggcgagctgcaggactacgtgcaccaggacctgcggaagttcctgcccgccctggccgaggaagtgcaaattcacctggtggaagccctgcccatcgtgttgaacatgttcgagaagaagctgagcagctacgcccagagccacctggaaaacacctccatcaaggtgcacctgagaaccgccgtggccaaggtggaagagaagcagctgctggccaagaccaagcacgaggacggcaagattaccgaggaaaccatcccctacggcaccctgatttgggccaccggcaacaaggccagacccgtgatcaccgacctgttcaagaagattcccgagcagaacagctccaagagaggactggccgtgaacgacttcttgcaggtcaaaggcagcaacaacatcttcgccatcggcgacaacgcctttgccggcctgccacctacagcccaggtagcccaccaggaagccgaatacctggccaagaatttcgacaagatggctcagatccccaatttccagaagaatctgtcctcccggaaggataagatcgacctgctgttcgaggaaaacaacttcaagcccttcaagtacaacgacctgggcgccctggcctacctgggctccgaaagagccattgccaccatcagaagcggcaagagaaccttctacaccggcggaggcctgatgaccttctacctgtggcggatcttgtacctgagcatgatcctgagcgcccgcagcagactgaaggtgttcttcgactggattaagctggccttcttcaaaagggacttcttcaaaggcctgtga

SEQ ID NO: 130 - DNA, 1542 bp, Artificial Sequence
  source: /note="Description of Artificial Sequence: Synthetic polynucleotide"
atgctgagcaagaacctgtacagcaacaagcggctgctgaccagcaccaacaccctcgtgagattcgccagcaccagatccaccggcgtcgaaaacagcggggctggccctaccagcttcaagaccatgaaggtcatcgacccccagcacagcgacaagccaaacgtgctgatcctgggctctggctggggcgccatcagctttctgaagcacatcgacaccaagaagtacaacgtcagcatcatcagccccagaagctacttcctgtttacccccctgctgcccagcgcccctgtggggaccgtggacgagaagtccatcatcgagcccatcgtgaacttcgctctgaagaaaaagggcaacgtcacctactacgaggccgaggccaccagcatcaaccccgaccggaacaccgtgaccatcaagagcctgagcgccgtgagccagctgtaccagcccgagaaccacctgggcctgcaccaggccgagcccgctgaaattaagtacgactacctgatcagtgccgtgggcgccgaacccaacacctttggtatccccggggtgaccgactacggccacttcctgaaagagatccccaacagcctggaaatccggcggaccttcgccgccaacctggaaaaggccaacctgctgcctaagggcgaccccgagagaagaagactgctgagcatcgtggtcgtgggcggaggccccacaggcgtggaagctgctggcgagctgcaggattacgtgcaccaggacctgcggaagttcctccccgccctggccgaggaagtgcagattcacctggtggaagccctgcccatcgttctgaacatgttcgagaagaagctgtcaagctacgcccagagccacctggaaaacacctccatcaaggtgcacctgagaaccgccgtggccaaagtggaagagaagcagctgttggccaagaccaagcacgaggacggcaagattaccgaggaaaccatcccctacggcactctgatttgggccaccggcaacaaggccagacccgtgatcaccgacctgttcaagaagatccccgagcagaacagctccaagcggggcctggccgtgaacgacttcttgcaggtcaaaggcagcaacaacatcttcgccatcggcgacaacgcctttgccggcctgcctcctacagcccaggtagcccaccaggaagccgagtacctggccaagaacttcgacaagatggctcagatccccaatttccagaagaacctgtcctcccggaaggataagatcgacctgctgttcgaggaaaacaacttcaagcccttcaagtacaacgatctgggcgccctggcctacctgggcagcgaaagagccattgccaccatcagaagcggcaagcggaccttctacaccggcggaggcctgatgaccttctacctgtggcggatcttgtacctgagcatgatcctgagcgcccgcagcagactgaaggtgttcttcgactggatcaagatggccttcttcaaaagggacttcttcaagggcctgtga

SEQ ID NO: 131 - DNA, 1542 bp, Artificial Sequence
  source: /note="Description of Artificial Sequence: Synthetic polynucleotide"
atgctaagcaagaatctgtacagcaacaagcggttgctgaccagcaccaacaccctcgtgcgcttcgccagcaccagatccaccggcgtcgaaaacagcggggctggccccaccagcttcaagaccatgaaggtcatcgacccccagcacagcgacaagcccaacgtgctgatcctgggctctggctggggcgccatcagctttctgaagcacatcgacaccaagaagtacaacgtcagcatcatcagccccagaagctacttcctgttcacccccctgctgcccagcgcccctgtgggaaccgtggacgagaagtccatcatcgagcccatcgtgaattttgccctgaagaaaaagggcaacgtcacctactacgaggccgaggccaccagcatcaaccccgaccggaacaccgtgaccatcaagaacctgagcgccgtgtcccagctgtaccagcccgagaaccacctgggcctgcaccaggccgagcctgccgaaattaagtacgactatctgatcagcgccgtaggcgccgagcccaacacctttggaattcccggcgtgaccgactacggccacttcctgaaagagatccccaacagcctggaaatacggcggactttcgccgccaacctggaaaaggccaacctgttgccaaagggcgaccccgagcggagaaggctgctgagcatcgtggtcgtgggcggaggccccacaggcgtggaggctgctggcgaactgcaggactacgtgcaccaggacctgcggaagttcctgcccgccctggccgaggaagtgcagattcacctggtggaagccctgcccatcgtgctgaacatgttcgagaagaagctgagcagctacgcccagagccacctggaaaacacctccatcaaagtgcacctgagaaccgccgtggccaaggtggaagagaagcagctgctggccaagaccaagcacgaggacggcaagataaccgaggaaactatcccatacggcaccctgatttgggccaccggcaacaaggccagacccgtgatcaccgacctgttcaagaagatccccgagcagaacagcagcaagcggggcctggccgtgaacgacttcctgcaggtcaaaggcagcaacaacatcttcgccatcggcgacaacgcctttgccggcctgcctcctacagcccaggtggcccaccaggaagccgaatacctggccaagaacttcgacaagatggcccagatccccaatttccagaagaacctgtcctccagaaaggataagatcgatctgctgttcgaggagaacaacttcaagcccttcaagtacaacgacctgggcgccttagcctacctgggcagcgaaagagccattgccaccatcagaagcggcaagcggaccttctacaccggtggaggcctgatgaccttctacctgtggcggattctgtacctgagcatgatcctgagcgcccgcagcagactgaaggtgttcttcgactggatcaagctggccttcttcaagagagacttcttcaagggcctgtga

SEQ ID NO: 132 - DNA, 1542 bp, Artificial Sequence
  source: /note="Description of Artificial Sequence: Synthetic polynucleotide"
atgctgagcaagaacctgtacagcaacaagcggctgctgaccagcaccaacaccctcgtccgcttcgccagcaccagatccaccggcgtcgaaaacagcggggctggccccaccagcttcaagaccatgaaggtcatcgaccctcagcacagcgacaagcccaacgtgctgatcctgggctctggctggggcgccatctcgtttctgaagcacatcgacaccaagaagtacaacgtcagcatcatctctcccagaagctacttcctgttcacccccctgctgcccagcgcacctgtgggaaccgtggacgagaagtccatcatcgagcccatcgtgaactttgccctgaagaaaaagggcaacgtcacctactacgaggccgaggccaccagcatcaatcccgacaggaacaccgtgaccatcaagagcctgagcgccgtgtcccagctgtaccagcccgagaaccacctgggcctgcaccaggccgagcccgccgagattaagtacgactacctgatcagcgccgtaggcgccgagcccaacacctttggaatccccggcgtgaccgactacggccacttcctgaaagagattcccaacagcctggaaatccggcggaccttcgccgccaacctggaaaaggccaacctgctgcctaagggcgatcccgagcggagaaggctgctgagcatcgtggtcgtgggcggaggccccacaggcgtggaagctgctggcgagctgcaggactacgtgcaccaggacctgcggaagtttctccccgccctggccgaggaagtgcagattcacctggtggaagccctgcccatcgtgctgaacatgtttgagaagaagctgagcagctacgcccaaagccacctggaaaacacctccatcaaggtgcacctgagaaccgccgtggccaaggtggaagagaagcaattgttggccaagaccaagcacgaggacggcaagattaccgaggaaaccatcccctacggcaccctgatttgggccaccggcaacaaggccagacccgtgatcaccgacctgttcaagaaaatccccgagcagaacagcagcaagcggggcctggccgtgaacgactttctgcaggtgaaaggcagcaacaacatcttcgccatcggcgacaacgcctttgccggcctgcctcctacagcccaggtggcccaccaagaagccgagtacctggccaagaacttcgacaagatggcccagatccccaatttccagaagaacctgtcctcccggaaggataagatcgacctcctgttcgaggaaaacaacttcaaacccttcaagtacaacgacctgggcgccctggcctacctgggcagcgaaagagccattgccaccatcagaagcggcaagcggaccttctacaccggcggaggcctgatgaccttctacctgtggcagatcctgtacctgtccatgatcctaagcgcccgcagcagactgaaggtgttcttcgactggatcaagctggcctttttcaaaagggactttttcaagggcctgtga

SEQ ID NO: 133 - DNA, 1542 bp, Artificial Sequence
  source: /note="Description of Artificial Sequence: Synthetic polynucleotide"
atgctgagcaagaacctgtatagcaacaagcggctgctgaccagcacgaataccctcgtgcgcttcgccagcaccagatccaccggcgtcgaaaacagcggggctggccccaccagctttaagaccatgaaggtcatcgacccccagcacagcgacaagcccaacgtgctgatactgggctctggctggggcgccatcagctttctgaagcacatcgacaccaagaagtacaacgtcagcatcatcagccccagaagctacttcctgttcacccccctgctgcccagcgcccctgttggaaccgtggacgagaagtccatcatcgagcccatcgtgaacttcgctctgaagaaaaagggcaacgtcacctactacgaggccgaggccaccagcatcaaccccgaccggaacaccgtgaccatcaagagcctgagcgccgtgagccagctgtaccagcccgagaaccacctgggcctgcaccaggccgagcccgccgagattaagtacgactacctgatcagcgccgtgggtgccgagcccaacacctttggaatccccggcgtgaccgactacggccacttcctgaaagagatccccaacagcctggaaatacggcggaccttcgccgccaacctggaaaaggccaacctgctgcctaagggcgaccccgagcggagaaggctgctgagcattgtggtcgtgggcggagggcccacaggcgtggaagctgctggcgaactgcaggactacgtgcaccaggacctgcggaagttcctgcccgccctggccgaggaagtgcagattcacctggtggaagccctgcccatcgtgctgaacatgttcgagaagaagctgagcagctacgcccagagccacctggaaaacacctccatcaaagtgcacctgagaaccgccgtggccaaggtggaagagaagcagctgctggccaagaccaagcacgaggacggcaagattaccgaggaaaccatcccctacggcaccctgatttgggccaccggcaacaaggcaagacccgtgatcactgacctgttcaagaaaatccccgagcagaactcgagcaagcggggcctggccgtgaacgacttcctgcaggtcaaaggcagcaacaacatcttcgccatcggcgacaacgcctttgccggcctgcctcctacagcccaggtggcccaccaggaagccgagtatctggccaagaacttcgacaagatggcccagatcccaaatttccagaagaacctgtcctcccggaaggataagatcgacctgttgttcgaggaaaacaacttcaagcccttcaagtacaacgacctgggtgccctggcctacctgggaagcgaaagggccattgccaccatcagaagcggcaagcggaccttctacaccggcggaggcctgatgaccttctacttatggcagatcctgtacctgagcatgatcctaagcgcccgcagcagactgaaggtcttcttcgactggattaagctggcattcttcaagagggacttcttcaagggcctgtga

SEQ ID NO: 134 - DNA, 1542 bp, Artificial Sequence
  source: /note="Description of Artificial Sequence: Synthetic polynucleotide"
atgctgagcaagaatctgtacagcaacaagcggttgctgaccagcaccaacaccctcgtccgcttcgccagcaccagatccaccggggtcgaaaactccggggctggccccaccagcttcaagaccatgaaggtcatcgacccccagcacagcgacaagcccaacgtgctgatcctgggctctggctggggagccatcagctttctgaagcacatcgacaccaagaagtacaacgtcagcatcatcagccccagaagctacttcctgttcacgcccctgctgcccagcgcacctgtgggaaccgtagacgagaagtccatcatcgagcccatcgtgaacttcgccctgaagaaaaagggcaacgtcacctactacgaggccgaagccaccagcatcaaccccgaccggaacaccgtgaccatcaagagcctgagcgccgtgtcccagctataccagcccgagaaccacctgggcctgcaccaggcagagcccgccgagattaagtacgactacctgatcagcgccgtgggcgccgagcccaacacctttggaatccccggcgtgaccgactacggccacttcttcaaagagatccccaacagcctggaaatccggagaaccttcgccgccaacctggaaaaggccaacctgctgcctaagggcgaccccgagcggagaaggctgctgagcatcgtggtcgtgggcggtggccccactggcgtggaagctgctggcgagctgcaggactacgtgcaccaggacctgagaaagttcctgcccgccctggccgaggaagtccagattcacttggtggaagccctgcccatcgttctgaacatgttcgagaagaagctgagcagctacgcccagagccacctggaaaacacttccatcaaggtgcacctgagaaccgccgtggccaaggtggaagagaagcagctgctggccaagaccaagcacgaggacggcaagattaccgaggaaaccattccctacggcaccctgatttgggccaccggcaacaaggccagacccgtgatcaccgacctgttcaagaagatccccgagcagaacagcagcaagcggggcttggccgtgaacgacttcctgcaggtcaaaggcagcaacaacatcttcgccatcggcgacaacgcatttgccggcctgcctcctacagcccaggtggcccaccaggaggccgagtacctggccaagaacttcgataagatggcccagatccccaatttccagaagaacctgtcctcccggaaggataagatcgacctgctgttcgaggaaaacaacttcaagcccttcaagtacaacgacctgggtgccctggcctacctgggcagcgaaagagccattgccaccatcagatccggcaagcggaccttctacaccggcggaggcttaatgaccttctacctgtggcggatcctgtacctgagcatgatcctgagcgcccgcagcagactgaaggtgtttttcgactggatcaagctggccttcttcaagagggacttcttcaagggcctgtga

SEQ ID NO: 135 - DNA, 1542 bp, Artificial Sequence
  source: /note="Description of Artificial Sequence: Synthetic polynucleotide"
atgctgagcaagaacctgtacagcaaccggcggctgctgaccagcaccaacaccctcgtgcgcttcgccagcaccagatccaccggcgtcgaaaacagcggggctggccccaccagcttcaagaccatgaaggtcatcgacccccagcacagcgacaagcccaacgtgctgatcctgggctctggctggggcgccatcagctttctgaagcacatcgacaccaagaagtacaacgtcagcatcatcagccccagaagctacttcctgttcacccccctgctgcccagcgcccctgtgggaaccgtggacgagaagtccatcatcgagcccatcgtgaacttcgccctgaagaaaaagggcaacgtcacctactacgaggccgaggccaccagcatcaaccccgaccggaacaccgtgaccatcaagagcctgagcgccgtgtcccagctgtaccagcccgagaaccacctgggcctgcaccaggccgagcccgccgagattaagtacgactacctgatcagcgccgtgggcgccgagcccaacacctttggaatccccggcgtgaccgactacggccacttcctgaaagagatccccaacagcctggaaatccggcggaccttcgccgccaacctggaaaaggccaacctgctgcctaagggcgaccccgagcggagaaggctgctgagcatcgtggtcgtgggcggaggccccacaggcgtggaagctgctggcgagctgcaggactacgtgcaccaggacctgcggaagttcctgcccgccctggccgaggaagtgcagattcacctggtggaagccctgcccatcgtgctgaacatgttcgagaagaagctgagcagctacgcccagagccacctggaaaacacctccatcaaggtgcacctgagaaccgccgtggccaaggtggaagagaagcagctgctggccaagaccaagcacgaggacggcaagattaccgaggaaaccatcccctacggcaccctgatttgggccaccggcaacaaggccagacccgtgatcaccgacctgttcaagaagatccccgagcagaacagcagcaagcggggcctggccgtgaacgacttcctgcaggtcaaaggcagcaacaacatcttcgccatcggcgacaacgcctttgccggcctgcctcctacagcccaggtggcccaccaggaagccgagtacctggccaagaacttcgacaagatggcccagatccccaatttccagaagaacctgtcctcccggaaggataagatcgacctgctgttcgaggaaaacaacttcaagcccttcaagtacaacgacctgggcgccctggcctacctgggcagcgaaagagccattgccaccatcagaagcggcaagcggaccttctacaccggcggaggcctgatgaccttctacctgtggcggatcctgtacctgagcatgatcctgagcgcccgcagcagactgaaggtgttcttcgactggatcaagctggccttcttcaagagggacttcttcaagggcctgtga

SEQ ID NO: 136 - DNA, 1542 bp, Artificial Sequence
  source: /note="Description of Artificial Sequence: Synthetic polynucleotide"
atgctgagcaagaacctgtacagcaacaagcggctgctgaccagcaccaacaccctcgtgcgcttcgccagcaccagatccaccggcgtcgaaaacagcggggctggccccaccagcttcaagaccatgaaggtcatcgacccccagcacagcgacaagcccaacgtgctgatcctgggctctggctggggcgccatcagctttctgaagcacatcgacaccaagaagtacaacgtcagcatcatcagccccagaaagtacttcctgttcacccccctgctgcccagcgcccctgtgggaaccgtggacgagaagtccatcatcgagcccatcgtgaacttcgccctgaagaaaaagggcaacgtcacctactacgaggccgaggccaccagcatcaaccccgaccggaacaccgtgaccatcaagagcctgagcgccgtgtcccagctgtaccagcccgagaaccacctgggcctgcaccaggccgagcccgccgagattaagtacgactacctgatcagcgccgtgggcgccgagcccaacacctttggaatccccggcgtgaccgactacggccacttcctgaaagagatccccaacagcctggaaatccggcggaccttcgccgccaacctggaaaaggccaacctgctgcctaagggcgaccccgagcggagaaggctgctgagcatcgtggtcgtgggcggaggccccacaggcgtggaagctgctggcgagctgcaggactacgtgcaccaggacctgcggaagttcctgcccgccctggccgaggaagtgcagattcacctggtggaagccctgcccatcgtgctgaacatgttcgagaagaagctgagcagctacgcccagagccacctggaaaacacctccatcaaggtgcacctgagaaccgccgtggccaaggtggaagagaagcagctgctggccaagaccaagcacgaggacggcaagattaccgaggaaaccatcccctacggcaccctgatttgggccaccggcaacaaggccagacccgtgatcaccgacctgttcaagaagatccccgagcagaacagcagcaagcggggcctggccgtgaacgacttcctgcaggtcaaaggcagcaacaacatcttcgccatcggcgacaacgcctttgccggcctgcctcctacagcccaggtggcccaccaggaagccgagtacctggccaagaacttcgacaagatggcccagatccccaatttccagaagaacctgtcctcccggaaggataagatcgacctgctgttcgaggaaaacaacttcaagcccttcaagtacaacgacctgggcgccctggcctacctgggcagcgaaagagccattgccaccatcagaagcggcaagcggaccttctacaccggcggaggcctgatgaccttctacctgtggcggatcctgtacctgagcatgatcctgagcgcccgcagcagactgaaggtgttcttcgactggatcaagctggccttcttcaagagggacttcttcaagggcctgtga

SEQ ID NO: 137 - DNA, 1542 bp, Artificial Sequence
  source: /note="Description of Artificial Sequence: Synthetic polynucleotide"
atgctgagcaagaacctgtacagcaacaagcggctgctgaccagcaccaacaccctcgtgcgcttcgccagcaccagatccaccggcgtcgaaaacagcggggctggccccaccagcttcaagaccatgaaggtcatcgacccccagcacagcgacaagcccaacgtgctgatcctgggctctggctggggcgccatcagctttctgaagcacatcgacaccaagaagtacaacgtcagcatcatcagccccagaagctacttcctgttcacccccctgatgcccagcgcccctgtgggaaccgtggacgagaagtccatcatcgagcccatcgtgaacttcgccctgaagaaaaagggcaacgtcacctactacgaggccgaggccaccagcatcaaccccgaccggaacaccgtgaccatcaagagcctgagcgccgtgtcccagctgtaccagcccgagaaccacctgggcctgcaccaggccgagcccgccgagattaagtacgactacctgatcagcgccgtgggcgccgagcccaacacctttggaatccccggcgtgaccgactacggccacttcctgaaagagatccccaacagcctggaaatccggcggaccttcgccgccaacctggaaaaggccaacctgctgcctaagggcgaccccgagcggagaaggctgctgagcatcgtggtcgtgggcggaggccccacaggcgtggaagctgctggcgagctgcaggactacgtgcaccaggacctgcggaagttcctgcccgccctggccgaggaagtgcagattcacctggtggaagccctgcccatcgtgctgaacatgttcgagaagaagctgagcagctacgcccagagccacctggaaaacacctccatcaaggtgcacctgagaaccgccgtggccaaggtggaagagaagcagctgctggccaagaccaagcacgaggacggcaagattaccgaggaaaccatcccctacggcaccctgatttgggccaccggcaacaaggccagacccgtgatcaccgacctgttcaagaagatccccgagcagaacagcagcaagcggggcctggccgtgaacgacttcctgcaggtcaaaggcagcaacaacatcttcgccatcggcgacaacgcctttgccggcctgcctcctacagcccaggtggcccaccaggaagccgagtacctggccaagaacttcgacaagatggcccagatccccaatttccagaagaacctgtcctcccggaaggataagatcgacctgctgttcgaggaaaacaacttcaagcccttcaagtacaacgacctgggcgccctggcctacctgggcagcgaaagagccattgccaccatcagaagcggcaagcggaccttctacaccggcggaggcctgatgaccttctacctgtggcggatcctgtacctgagcatgatcctgagcgcccgcagcagactgaaggtgttcttcgactggatcaagctggccttcttcaagagggacttcttcaagggcctgtga

SEQ ID NO: 138 - DNA, 1542 bp, Artificial Sequence
  source: /note="Description of Artificial Sequence: Synthetic polynucleotide"
atgctgagcaagaacctgtacagcaacaagcggctgctgaccagcaccaacaccctcgtgcgcttcgccagcaccagatccaccggcgtcgaaaacagcggggctggccccaccagcttcaagaccatgaaggtcatcgacccccagcacagcgacaagcccaacgtgctgatcctgggctctggctggggcgccatcagctttctgaagcacatcgacaccaagaagtacaacgtcagcatcatcagccccagaagctacttcctgttcacccccctgctgcccagcgcccctgtgggaaccgtggacgagaagtccatcatcgagcccatcgtgaacttcgccctgaagaaaaagggcaacgtcacctactacgaggccgaggccaccagcatcaaccccgaccggaacaccgtgaccatcaagagcctgagcgccgtgtcccagctgtaccagcccgagaaccacctgggcctgcaccaggccgagcccgccgagattaagtacgactacctgatcagcgccgtgggcgccgagcccaacacctttggaatccccggcgtgaccgactacggccacttcctgaaagagatccccaacagcctggaaatccggcggaccttcgccgccaacctggaaaaggccaacctgctgcctaagggcgaccccgagcggagaaggctgctgagcatcgtggtcgtgggcggaggccccacaggcgtggaagctgctggcgagctgcaggactacgtgcaccaggacctgcggaagttcctgcccgccctggccgaggaagtgcagattcacctggtggaagccctgcccatcgtgctgaacatgttcgagaagaagctgagcagctacgcccagagccacctggaaaacacctccatcaaggtgcacctgagaaccgccgtggccaaggtggaagagaagcagctgctggccaagaccaagcacgaggacggcaagattaccgaggaaaccatcccctacggcaccctgatttgggccaccggcaacaaggccagacccgtgatcaccgacctgttcaagaagatccccgagcagaacagcagcaagcggggcctggccgtgaacgacttcctgcaggtcaaaggcagcaacaacatcttcgccatcggcgacaacgcctttgccggcctgcctcctacagcccaggtggcccaccaggaagccgagtacctggccaagaacttcgacaagatggcccagatccccaatttccagaagaacctgtcctcccggaaggataagatcgacctgctgttcgaggaaaacaacttcaagcccttcaagtacaacgacctgggcgccctggcctacctgggcagcgaaagagccattgccaccatcagaagcggcaagcggaccttctacaccggcggaggcctgatgaccttctacctgtggcagatcctgtacctgagcatgatcctgagcgcccgcagcagactgaaggtgttcttcgactggatcaagctggccttcttcaagagggacttcttcaagggcctgtga

SEQ ID NO: 139 - DNA, 1542 bp, Artificial Sequence
  source: /note="Description of Artificial Sequence: Synthetic polynucleotide"
atgctgagcaagaacctgtacagcaacaagcggctgctgaccagcaccaacaccctcgtgcgcttcgccagcaccagatccaccggcgtcgaaaacagcggggctggccccaccagcttcaagaccatgaaggtcatcgacccccagcacagcgacaagcccaacgtgctgatcctgggctctggctggggcgccatcagctttctgaagcacatcgacaccaagaagtacaacgtcagcatcatcagccccagaagctacttcctgttcacccccctgctgcccagcgcccctgtgggaaccgtggacgagaagtccatcatcgagcccatcgtgaacttcgccctgaagaaaaagggcaacgtcacctactacgaggccgaggccaccagcatcaaccccgaccggaacaccgtgaccatcaagagcctgagcgccgtgtcccagctgtaccagcccgagaaccacctgggcctgcaccaggccgagcccgccgagattaagtacgactacctgatcagcgccgtgggcgccgagcccaacacctttggaatccccggcgtgaccgactacggccacttcctgaaagagatccccaacagcctggaaatccggcggaccttcgccgccaacctggaaaaggccaacctgctgcctaagggcgaccccgagcggagaaggctgctgagcatcgtggtcgtgggcggaggccccacaggcgtggaagctgctggcgagctgcaggactacgtgcaccaggacctgcggaagttcctgcccgccctggccgaggaagtgcagattcacctggtggaagccctgcccatcgtgctgaacatgttcgagaagaagctgagcagctacgcccagagccacctggaaaacacctccatcaaggtgcacctgagaaccgccgtggccaaggtggaagagaagcagctgctggccaagaccaagcacgaggacggcaagattaccgaggaaaccatcccctacggcaccctgatttgggccaccggcaacaaggccagacccgtgatcaccgacctgttcaagaagatccccgagcagaacagcagcaagcggggcctggccgtgaacgacttcctgcaggtcaaaggcagcaacaacatcttcgccatcggcgacaacgcctttgccggcctgcctcctacagcccaggtggcccaccaggaagccgagtacatcgccaagaacttcgacaagatggcccagatccccaatttccagaagaacctgtcctcccggaaggataagatcgacctgctgttcgaggaaaacaacttcaagcccttcaagtacaacgacctgggcgccctggcctacctgggcagcgaaagagccattgccaccatcagaagcggcaagcggaccttctacaccggcggaggcctgatgaccttctacctgtggcggatcctgtacctgagcatgatcctgagcgcccgcagcagactgaaggtgttcttcgactggatcaagctggccttcttcaagagggacttcttcaagggcctgtga

SEQ ID NO: 140 - DNA, 1542 bp, Artificial Sequence
  source: /note="Description of Artificial Sequence: Synthetic polynucleotide"
atgctgagcaagaacctgtacagcaacaagcggctgctgaccagcaccaacaccctcgtgcgcttcgccagcaccagatccaccggcgtcgaaaacagcggggctggccccaccagcttcaagaccatgaaggtcatcgacccccagcacagcgacaagcccaacgtgctgatcctgggctctggctggggcgccatcagctttctgaagcacatcgacaccaagaagtacaacgtcagcatcatcagccccagaagctacttcctgttcacccccctgctgcccagcgcccctgtgggaaccgtggacgagaagtccatcatcgagcccatcgtgaacttcgccctgaagaaaaagggcaacgtcacctactacgaggccgaggccaccagcatcaaccccgaccggaacaccgtgaccatcaagagcctgagcgccgtgtcccagctgtaccagcccgagaaccacctgggcctgcaccaggccgagcccgccgagattaagtacgactacctgatcagcgccgtgggcgccgagcccaacacctttggaatccccggcgtgaccgactacggccacttcctgaaagagatccccaacagcctggaaatccggcggaccttcgccgccaacctggaagaggccaacctgctgcctaagggcgaccccgagcggagaaggctgctgagcatcgtggtcgtgggcggaggccccacaggcgtggaagctgctggcgagctgcaggactacgtgcaccaggacctgcggaagttcctgcccgccctggccgaggaagtgcagattcacctggtggaagccctgcccatcgtgctgaacatgttcgagaagaagctgagcagctacgcccagagccacctggaaaacacctccatcaaggtgcacctgagaaccgccgtggccaaggtggaagagaagcagctgctggccaagaccaagcacgaggacggcaagattaccgaggaaaccatcccctacggcaccctgatttgggccaccggcaacaaggccagacccgtgatcaccgacctgttcaagaagatccccgagcagaacagcagcaagcggggcctggccgtgaacgacttcctgcaggtcaaaggcagcaacaacatcttcgccatcggcgacaacgcctttgccggcctgcctcctacagcccaggtggcccaccaggaagccgagtacctggccaagaacttcgacaagatggcccagatccccaatttccagaagaacctgtcctcccggaaggataagatcgacctgctgttcgaggaaaacaacttcaagcccttcaagtacaacgacctgggcgccctggcctacctgggcagcgaaagagccattgccaccatcagaagcggcaagcggaccttctacaccggcggaggcctgatgaccttctacctgtggcggatcctgtacctgagcatgatcctgagcgcccgcagcagactgaaggtgttcttcgactggatcaagctggccttcttcaagagggacttcttcaagggcctgtga

SEQ ID NO: 141 - DNA, 1542 bp, Artificial Sequence
  source: /note="Description of Artificial Sequence: Synthetic polynucleotide"
atgctgagcaagaacctgtacagcaacaagcggctgctgaccagcaccaacaccctcgtgcgcttcgccagcaccagatccaccggcgtcgaaaacagcggggctggccccaccagcttcaagaccatgaaggtcatcgacccccagcacagcgacaagcccaacgtgctgatcctgggctctggctggggcgccatcagctttctgaagcacatcgacaccaagaagtacaacgtcagcatcatcagccccagaagctacttcctgttcacccccctgctgcccagcgcccctgtgggaaccgtggacgagaagtccatcatcgagcccatcgtgaacttcgccctgaagaaaaagggcaacgtcacctactacgaggccgaggccaccagcatcaaccccgaccggaacaccgtgaccatcaagagcctgagcgccgtgtcccagctgtaccagcccgagaaccacctgggcctgcaccaggccgagcccgccgagattaagtacgactacctgatcagcgccgtgggcgccgagcccaacacctttggaatccccggcgtgaccgactacggccacttcctgaaagagatccccaacagcctggaaatccggcggaccttcgccgccaacctggaaaaggccaacctgctgcctaagggcgaccccgagcggagaaggctgctgagcatcgtggtcgtgggcggaggccccacaggcgtggaagctgctggcgagctgcaggactacgtgcaccaggacctgcggaagttcctgcccgccctggccgaggaagtgcagattcacctggtggaagccctgcccatcgtgctgaacatgttcgagaagaagctgagcagctacgcccagagccacctggaaaacacctccatcaaggtgcacctgagaaccgccgtggccaaggtggaagagaagcagctgctggccaagaccaagcacgaggacggcaagattaccgaggaaaccatcccctacggcaccctgatttgggccaccggcaacaaggccagacccgtgatcaccgacctgttcaagaagatccccgagcagaacagcagcaagcggggcctggccgtgaacgacttcctgcaggtcaaaggcagcaacaacatcttcgccatcggcgacaacgcctttagcggcctgcctcctacagcccaggtggcccaccaggaagccgagtacctggccaagaacttcgacaagatggcccagatccccaatttccagaagaacctgtcctcccggaaggataagatcgacctgctgttcgaggaaaacaacttcaagcccttcaagtacaacgacctgggcgccctggcctacctgggcagcgaaagagccattgccaccatcagaagcggcaagcggaccttctacaccggcggaggcctgatgaccttctacctgtggcggatcctgtacctgagcatgatcctgagcgcccgcagcagactgaaggtgttcttcgactggatcaagctggccttcttcaagagggacttcttcaagggcctgtga

SEQ ID NO: 142 - DNA, 1542 bp, Artificial Sequence
  source: /note="Description of Artificial Sequence: Synthetic polynucleotide"
atgctgagcaagaacctgtacagcaacaagcggctgctgaccagcaccaacaccctcgtgcgcttcgccagcaccagatccaccggcgtcgaaaacagcggggctggccccaccagcttcaagaccatgaaggtcatcgacccccagcacagcgacaagcccaacgtgctgatcctgggctctggctggggcgccatcagctttctgaagcacatcgacaccaagaagtacaacgtcagcatcatcagccccagaagctacttcctgttcacccccctgctgcccagcgcccctgtgggaaccgtggacgagaagtccatcatcgagcccatcgtgaacttcgccctgaagaaaaagggcaacgtcacctactacgaggccgaggccaccagcatcaaccccgaccggaacaccgtgaccatcaagagcctgagcgccgtgtcccagctgtaccagcccgagaaccacctgggcatgcaccaggccgagcccgccgagattaagtacgactacctgatcagcgccgtgggcgccgagcccaacacctttggaatccccggcgtgaccgactacggccacttcctgaaagagatccccaacagcctggaaatccggcggaccttcgccgccaacctggaaaaggccaacctgctgcctaagggcgaccccgagcggagaaggctgctgagcatcgtggtcgtgggcggaggccccacaggcgtggaagctgctggcgagctgcaggactacgtgcaccaggacctgcggaagttcctgcccgccctggccgaggaagtgcagattcacctggtggaagccctgcccatcgtgctgaacatgttcgagaagaagctgagcagctacgcccagagccacctggaaaacacctccatcaaggtgcacctgagaaccgccgtggccaaggtggaagagaagcagctgctggccaagaccaagcacgaggacggcaagattaccgaggaaaccatcccctacggcaccctgatttgggccaccggcaacaaggccagacccgtgatcaccgacctgttcaagaagatccccgagcagaacagcagcaagcggggcctggccgtgaacgacttcctgcaggtcaaaggcagcaacaacatcttcgccatcggcgacaacgcctttgccggcctgcctcctacagcccaggtggcccaccaggaagccgagtacctggccaagaacttcgacaagatggcccagatccccaatttccagaagaacctgtcctcccggaaggataagatcgacctgctgttcgaggaaaacaacttcaagcccttcaagtacaacgacctgggcgccctggcctacctgggcagcgaaagagccattgccaccatcagaagcggcaagcggaccttctacaccggcggaggcctgatgaccttctacctgtggcggatcctgtacctgagcatgatcctgagcgcccgcagcagactgaaggtgttcttcgactggatcaagctggccttcttcaagagggacttcttcaagggcctgtga

SEQ ID NO: 143 - DNA, 1542 bp, Artificial Sequence
  source: /note="Description of Artificial Sequence: Synthetic polynucleotide"
atgctgagcaagaacctgtacagcaacaagcggctgctgaccagcaccaacaccatggtgcgcttcgccagcaccagatccaccggcgtcgaaaacagcggggctggccccaccagcttcaagaccatgaaggtcatcgacccccagcacagcgacaagcccaacgtgctgatcctgggctctggctggggcgccatcagctttctgaagcacatcgacaccaagaagtacaacgtcagcatcatcagccccagaagctacttcctgttcacccccctgctgcccagcgcccctgtgggaaccgtggacgagaagtccatcatcgagcccatcgtgaacttcgccctgaagaaaaagggcaacgtcacctactacgaggccgaggccaccagcatcaaccccgaccggaacaccgtgaccatcaagagcctgagcgccgtgtcccagctgtaccagcccgagaaccacctgggcctgcaccaggccgagcccgccgagattaagtacgactacctgatcagcgccgtgggcgccgagcccaacacctttggaatccccggcgtgaccgactacggccacttcctgaaagagatccccaacagcctggaaatccggcggaccttcgccgccaacctggaaaaggccaacctgctgcctaagggcgaccccgagcggagaaggctgctgagcatcgtggtcgtgggcggaggccccacaggcgtggaagctgctggcgagctgcaggactacgtgcaccaggacctgcggaagttcctgcccgccctggccgaggaagtgcagattcacctggtggaagccctgcccatcgtgctgaacatgttcgagaagaagctgagcagctacgcccagagccacctggaaaacacctccatcaaggtgcacctgagaaccgccgtggccaaggtggaagagaagcagctgctggccaagaccaagcacgaggacggcaagattaccgaggaaaccatcccctacggcaccctgatttgggccaccggcaacaaggccagacccgtgatcaccgacctgttcaagaagatccccgagcagaacagcagcaagcggggcctggccgtgaacgacttcctgcaggtcaaaggcagcaacaacatcttcgccatcggcgacaacgcctttgccggcctgcctcctacagcccaggtggcccaccaggaagccgagtacctggccaagaacttcgacaagatggcccagatccccaatttccagaagaacctgtcctcccggaaggataagatcgacctgctgttcgaggaaaacaacttcaagcccttcaagtacaacgacctgggcgccctggcctacctgggcagcgaaagagccattgccaccatcagaagcggcaagcggaccttctacaccggcggaggcctgatgaccttctacctgtggcggatcctgtacctgagcatgatcctgagcgcccgcagcagactgaaggtgttcttcgactggatcaagctggccttcttcaagagggacttcttcaagggcctgtga

SEQ ID NO: 144 - DNA, 1542 bp, Artificial Sequence
  source: /note="Description of Artificial Sequence: Synthetic polynucleotide"
atgctgagcaagaacctgtacagcaacaagcggctgctgaccagcaccaacaccctcgtgcgcttcgccagcaccagatccaccggcgtcgaaaacagcggggctggccccaccagcttcaagaccatgaaggtcatcgacccccagcacagcgacaagcccaacgtgctgatcctgggctctggctggggcgccatcagctttctgaagcacatcgacaccaagaagtacaacgtcagcatcatcagccccagaagctacttcctgttcacccccctgctgcccagcgcccctgtgggaaccgtggacgagaagtccatcatcgagcccatcgtgaacttcgccctgaagaaaaagggcaacgtcacctactacgaggccgaggccaccagcatcaaccccgaccggaacaccgtgaccatcaagagcctgagcgccgtgtcccagctgtaccagcccgagaaccacctgggcctgcaccaggccgagcccgccgagattaagtacgactacctgatcagcgccgtgggcgccgagcccaacacctttggaatccccggcgtgaccgactacggccacttcctgaaagagatccccaacagcctggaaatccggcggaccttcgccgccaacctggaaaaggccaacctgctgcctaagggcgaccccgagcggagaaggctgctgagcatcgtggtcgtgggcggaggccccacaggcgtggaagctgctggcgagctgcaggactacgtgcaccaggacctgcggaagttcctgcccgccctggccgaggaagtgcagattcacctggtggaagccctgcccatcgtgctgaacatgttcgagaaggagctgagcagctacgcccagagccacctggaaaacacctccatcaaggtgcacctgagaaccgccgtggccaaggtggaagagaagcagctgctggccaagaccaagcacgaggacggcaagattaccgaggaaaccatcccctacggcaccctgatttgggccaccggcaacaaggccagacccgtgatcaccgacctgttcaagaagatccccgagcagaacagcagcaagcggggcctggccgtgaacgacttcctgcaggtcaaaggcagcaacaacatcttcgccatcggcgacaacgcctttgccggcctgcctcctacagcccaggtggcccaccaggaagccgagtacctggccaagaacttcgacaagatggcccagatccccaatttccagaagaacctgtcctcccggaaggataagatcgacctgctgttcgaggaaaacaacttcaagcccttcaagtacaacgacctgggcgccctggcctacctgggcagcgaaagagccattgccaccatcagaagcggcaagcggaccttctacaccggcggaggcctgatgaccttctacctgtggcggatcctgtacctgagcatgatcctgagcgcccgcagcagactgaaggtgttcttcgactggatcaagctggccttcttcaagagggacttcttcaagggcctgtga

SEQ ID NO: 145 - DNA, 1542 bp, Artificial Sequence
  source: /note="Description of Artificial Sequence: Synthetic polynucleotide"
atgctgagcaagaacctgtacagcaacaagcggctgctgaccagcaccaacaccctcgtgcgcttcgccagcaccagatccaccggcgtcgaaaacagcggggctggccccaccagcttcaagaccatgaaggtcatcgacccccagcacagcgacaagcccaacgtgctgatcctgggctctggctggggcgccatcagctttctgaagcacatcgacaccaagaagtacaacgtcagcatcatcagccccagaagctacttcctgttcacccccctgctgcccagcgcccctgtgggaaccgtggacgagaagtccatcatcgagcccatcgtgaacttcgccctgaagaaaaagggcaacgtcacctactacgaggccgaggccaccagcatcaaccccgaccggaacaccgtgaccatcaagagcctgagcgccgtgtcccagctgtaccagcccgagaaccacctgggcctgcaccaggccgagcccgccgagattaagtacgactacctgatcagcgccgtgggcgccgagcccaacacctttggaatccccggcgtgaccgactacggccacttcctgaaagagatccccaacagcctggaaatccggcggaccttcgccgccaacctggaaaaggccaacctgctgcctaagggcgaccccgagcggagaaggctgctgagcatcgtggtcgtgggcggaggccccacaggcgtggaagctgctggcgagctgcaggactacgtgcaccaggacctgcggaagttcctgcccgccctggccgaggaagtgcagattcacctggtggaagccctgcccatcgtgctgaacatgttcgagaagaagctgagcagctacgcccagagccacctggaaaacacctccatcaaggtgcacctgagaaccgccgtggccaaggtggaagagaagcagctgctggccaagaccaagcacgaggacggcaagattaccgaggaaaccatcccctacggcaccctgatttgggccaccggcaacaaggccagacccgtgatcaccgacctgttcaagaagatccccgagcagaacagcagcaagcggggcctggccgtgaacgacttcctgcaggtcaaaggcagcaacaacatcttcgccatcggcgacaacgcctttgccggcctgcctcctacagcccaggtggcccaccaggaagccgagtacctggccaagaacttcgacaagatggcccagatccccaatttccagaagaacctgtcctcccggaaggataagatcgacctgctgttcgaggaaaacaacttcaagcccttcaagtacaacgacctgggcgccctggcctacctgggcagcgaaagagccattgccaccatcagaagcggcaagcggaccttctacaccggcggaggcctgatgaccttctacctgtggcggatcctgtacctgagcatgatcctgagcgcccgcagcagactgaaggtgttcttcgactggatcaagctggccttcttcaagagggacttcttcgagggcctgtga

SEQ ID NO: 146 - DNA, 1542 bp, Artificial Sequence
  source: /note="Description of Artificial Sequence: Synthetic polynucleotide"
atgctatcgaagaatttgtatagtaacaagaggttgctcacctcgacgaatacgctagtcagattcgcttccaccagatccacaggggtggaaaactccggagcaggtcctacatcttttaagaccatgaaagtcattgaccctcagcacagcgacaaaccaaacgtgctgatactgggttcggggtggggagctatttcgtttttaaagcacattgacaccaagaagtacaacgtttccatcatctctcctagaagctatttcttatttacgcctttgatgccttctgcaccagttgggacagtagacgaaaagtcaattattgagcccatcgttaattttgctctcaagaaaaaggggaacgttacctactatgaggcagaagccacctctatcaatcccgacaggaataccgttaccataaaatcattatctgccgttagccagctataccaacctgaaaaccatctagggctgcatcaagcagaacctgctgaaattaagtacgattatttaatcagtgctgtaggtgcggaacctaacacatttggtattcctggggtcactgattacggtcatttcctgaaggaaattcccaactctttggaaataagaagaacttttgccgccaatctagagaaggctaacttattgccaaagggtgatcccgaaagaagaagactactgtccattgtcgtggttggtggtgggcctactggtgtagaggccgctggtgaactacaggattatgttcaccaggacctgagaaagtttctccctgcattggccgaagaagtccaaattcacttggtcgaagctctgcccatcgttttgaatatgtttgagaaaaagctttcatcatacgcgcaatcacatttagaaaacacttcgatcaaagtacatctgagaacggctgtcgccaaagttgaagaaaagcaattgttggcaaagaccaaacacgaagacggtaaaataaccgaagaaactattccatacggtactttgatttgggccacgggtaacaaggcaagaccggtaatcactgaccttttcaagaaaattcctgagcaaaactcgtccaagagaggattggcagtgaatgactttttgcaggtggagggcagcaacaacattttcgccattggtgacaatgcatttgctgggttgccaccaaccgcccaagtagcgcaccaagaggccgaatatttggccaagaattttgataaaatggctcaaataccaaatttccaaaagaatctatcttcaagaaaggataaaattgatctcttgttcgaggagaacaactttaaacctttcaaatacaacgatttaggtgccttagcatacctgggatccgaaagggccattgcaaccatacgttccggtaagagaacattttacaccggtggtggcttaatgaccttctacttatggagaattttgtacttgtccatgattctatctgcaagatcgagattaaaggtctttttcgactggattaaattagcatttttcaaaagagacttttttaaaggattatag

SEQ ID NO: 147 - DNA, 1542 bp, Artificial Sequence
  source: /note="Description of Artificial Sequence: Synthetic polynucleotide"
atgctatcgaagaatttgtatagtaacaagaggttgctcacctcgacgaatacgctagtcagattcgcttccaccagatccacaggggtggaaaactccggagcaggtcctacatcttttaagaccatgaaagtcattgaccctcagcacagcgacaaaccaaacgtgctgatactgggttcggggtggggagctatttcgtttttaaagcacattgacaccaagaagtacaacgtttccatcatctctcctagaagctatttcttatttacgcctttgttaccttctgcaccagttgggacagtagacgaaaagtcaattattgagcccatcgttaattttgctctcaagaaaaaggggaacgttacctactatgaggcagaagccacctctatcaatcccgacaggaataccgttaccataaaatcattatctgccgttagccagctataccaacctgaaaaccatctagggctgcatcaagcagaacctgctgaaattaagtacgattatttaatcagtgctgtaggtgcggaacctaacacatttggtattcctggggtcactgattacggtcatttcctgaaggaaattcccaactctttggaaataagaagaacttttgccgccaatctagagaaggctaacttattgccaaagggtgatcccgaaagaagaagactactgtccattgtcgtggttggtggtgggcctactggtgtagaggccgctggtgaactacaggattatgttcaccaggacctgagaaagtttctccctgcattggccgaagaagtccaaattcacttggtcgaagctctgcccatcgttttgaatatgtttgagaaaaagctttcatcatacgcgcaatcacatttagaaaacacttcgatcaaagtacatctgagaacggctgtcgccaaagttgaagaaaagcaattgttggcaaagaccaaacacgaagacggtaaaataaccgaagaaactattccatacggtactttgatttgggccacgggtaacaaggcaagaccggtaatcactgaccttttcaagaaaattcctgagcaaaactcgtccaagagaggattggcagtgaatgactttttgcaggtggagggcagcaacaacattttcgccattggtgacaatgcatttgctgggttgccaccaaccgcccaagtagcgcaccaagaggccgaatatttggccaagaattttgataaaatggctcaaataccaaatttccaaaagaatctatcttcaagaaaggataaaattgatctcttgttcgaggagaacaactttaaacctttcaaatacaacgatttaggtgccttagcatacctgggatccgaaagggccattgcaaccatacgttccggtaagagaacattttacaccggtggtggcttaatgaccttctacttatggagaattttgtacatgtccatgattctatctgcaagatcgagattaaaggtctttttcgactggattaaattagcatttttcaaaagagacttttttaaaggattatag

SEQ ID NO: 148 - DNA, 1542 bp, Artificial Sequence
  source: /note="Description of Artificial Sequence: Synthetic polynucleotide"
atgctatcgaagaatttgtatagtaacaagaggttgctcacctcgacgaatacgctagtcagattcgcttccaccagatccacaggggtggaaaactccggagcaggtcctacatcttttaagaccatgaaagtcattgaccctcagcacagcgacaaaccaaacgtgctgatactgggttcggggtggggagctatttcgtttttaaagcacattgacaccaagaagtacaacgtttccatcatctctcctagaagctatttcttatttacgcctttgttaccttctgcaccagttgggacagtagacgaaaagtcaattattgagcccatcgttaattttgctctcaagaaaaaggggaacgttacctactatgaggcagaagccacctctatcaatcccgacaggaataccgttaccataaaatcattatctgccgttagccagctataccaacctgaaaaccatctagggctgcatcaagcagaacctgctgaaattaagtacgattatttaatcagtgctgtaggtgcggaacctaacacatttggtattcctggggtcactgattacggtcatttcttcaaggaaattcccaactctttggaaataagaagaacttttgccgccaatctagagaaggctaacttattgccaaagggtgatcccgaaagaagaagactactgtccattgtcgtggttggtggtgggcctactggtgtagaggccgctggtgaactacaggattatgttcaccaggacctgagaaagtttctccctgcattggccgaagaagtccaaattcacttggtcgaagctctgcccatcgttttgaatatgtttgagaaaaagctttcatcatacgcgcaatcacatttagaaaacacttcgatcaaagtacatctgagaacggctgtcgccaaagttgaagaaaagcaattgttggcaaagaccaaacacgaagacggtaaaataaccgaagaaactattccatacggtactttgatttgggccacgggtaacaaggcaagaccggtaatcactgaccttttcaagaaaattcctgagcaaaactcgtccaagagaggattggcagtgaatgactttttgcaggtgaaaggcagcaacaacattttcgccattggtgacaatgcatttgctgggttgccaccaaccgcccaagtagcgcaccaagaggccgaatatttggccaagaattttgataaaatggctcaaataccaaatttccaaaagaatctatcttcaagaaaggataaaattgatctcttgttcgaggagaacaactttaaacctttcaaatacaacgatttaggtgccttagcatacctgggatccgaaagggccattgcaaccatacgttccggtaagagaacattttacaccggtggtggcttaatgaccttctacttatggcagattttgtacttgtccatgattctatctgcaagatcgagattaaaggtctttttcgactggattaaattagcatttttcaaaagagacttttttaaaggattatag

SEQ ID NO: 149 - DNA, 1542 bp, Artificial Sequence
  source: /note="Description of Artificial Sequence: Synthetic polynucleotide"
atgctatcgaagaatttgtatagtaacaagaggttgctcacctcgacgaatacgatggtcagattcgcttccaccagatccacaggggtggaaaactccggagcaggtcctacatcttttaagaccatgaaagtcattgaccctcagcacagcgacaaaccaaacgtgctgatactgggttcggggtggggagctatttcgtttttaaagcacattgacaccaagaagtacaacgtttccatcatctctcctagaagctatttcttatttacgcctttgttaccttctgcaccagttgggacagtagacgaaaagtcaattattgagcccatcgttaattttgctctcaagaaaaaggggaacgttacctactatgaggcagaagccacctctatcaatcccgacaggaataccgttaccataaaatcattatctgccgttagccagctataccaacctgaaaaccatctagggctgcatcaagcagaacctgctgaaattaagtacgattatttaatcagtgctgtaggtgcggaacctaacacatttggtattcctggggtcactgattacggtcatttcctgaaggaaattcccaactctttggaaataagaagaacttttgccgccaatctagagaaggctaacttattgccaaagggtgatcccgaaagaagaagactactgtccattgtcgtggttggtggtgggcctactggtgtagaggccgctggtgaactacaggattatgttcaccaggacctgagaaagtttctccctgcattggccgaagaagtccaaattcacttggtcgaagctctgcccatcgttttgaatatgtttgagaaagagctttcatcatacgcgcaatcacatttagaaaacacttcgatcaaagtacatctgagaacggctgtcgccaaagttgaagaaaagcaattgttggcaaagaccaaacacgaagacggtaaaataaccgaagaaactattccatacggtactttgatttgggccacgggtaacaaggcaagaccggtaatcactgaccttttcaagaaaattcctgagcaaaactcgtccaagagaggattggcagtgaatgactttttgcaggtgaaaggcagcaacaacattttcgccattggtgacaatgcatttgctgggttgccaccaaccgcccaagtagcgcaccaagaggccgaatatttggccaagaattttgataaaatggctcaaataccaaatttccaaaagaatctatcttcaagaaaggataaaattgatctcttgttcgaggagaacaactttaaacctttcaaatacaacgatttaggtgccttagcatacctgggatccgaaagggccattgcaaccatacgttccggtaagagaacattttacaccggtggtggcttaatgaccttctacttatggagaattttgtacttgtccatgattctatctgcaagatcgagattaaaggtctttttcgactggattaaattagcatttttcaaaagagacttttttaaaggattatag

SEQ ID NO: 150 - DNA, 1542 bp, Artificial Sequence
  source: /note="Description of Artificial Sequence: Synthetic polynucleotide"
atgctatcgaagaatttgtatagtaacaagaggttgctcacctcgacgaatacgctagtcagattcgcttccaccagatccacaggggtggaaaactccggagcaggtcctacatcttttaagaccatgaaagtcattgaccctcagcacagcgacaaaccaaacgtgctgatactgggttcggggtggggagctatttcgtttttaaagcacattgacaccaagaagtacaacgtttccatcatctctcctagaagctatttcttatttacgcctttgttaccttctgcaccagttgggacagtagacgaaaagtcaattattgagcccatcgttaattttgctctcaagaaaaaggggaacgttacctactatgaggcagaagccacctctatcaatcccgacaggaataccgttaccataaaatcattatctgccgttagccagctataccaacctgaaaaccatctagggctgcatcaagcagaacctgctgaaattaagtacgattatttaatcagtgctgtaggtgcggaacctaacacatttggtattcctggggtcactgattacggtcatttcctgaaggaaattcccaactctttggaaataagaagaacttttgccgccaatctagagaaggctaacttattgccaaagggtgatcccgaaagaagaagactactgtccattgtcgtggttggtggtgggcctactggtgtagaggccgctggtgaactacaggattatgttcaccaggacctgagaaagtttttccctgcattggccgaagaagtccaaattcacttggtcgaagctctgcccatcgttttgaatatgtttgagaaaaagctttcatcatacgcgcaatcacatttagaaaacacttcgatcaaagtacatctgagaacggctgtcgccaaagttgaagaaaagcaattgttggcaaagaccaaacacgaagacggtaaaataaccgaagaaactattccatacggtactttgatttgggccacgggtaacaaggcaagaccggtaatcactgaccttttcaagaaaattcctgagcaaaactcgtccaagagaggattggcagtgaatgactttttgcaggtgaaaggcagcaacaacattttcgccattggtgacaatgcatttgctgggttgccaccaaccgcccaagtagcgcaccaagaggccgaatatttggccaagaattttgataaaatggctcaaataccaaatttccaaaagaatctatcttcaagaaaggataaaattgatctcttgttcgaggagaacaactttaaacctttcaaatacaacgatttaggtgccttagcatacctgggatccgaaagggccattgcaaccatacgttccggtaagagaacattttacaccggtggtggcttaatgaccttctacttatggagaattttgtacttgtccatgattctatctgcaagatcgagattaaaggtctttttcgactggattaaaatggcatttttcaaaagagacttttttaaaggattatag

SEQ ID NO: 151 - DNA, 1542 bp, Artificial Sequence
  source: /note="Description of Artificial Sequence: Synthetic polynucleotide"
atgctatcgaagaatttgtatagtaacaagaggttgctcacctcgacgaatacgctagtcagattcgcttccaccagatccacaggggtggaaaactccggagcaggtcctacatcttttaagaccatgaaagtcattgaccctcagcacagcgacaaaccaaacgtgctgatactgggttcggggtggggagctatttcgtttttaaagcacattgacaccaagaagtacaacgtttccatcatctctcctagaagctatttcttatttacgcctttgttaccttctgcaccagttgggacagtagacgaaaagtcaattattgagcccatcgttaattttgctctcaagaaaaaggggaacgttacctactatgaggcagaagccacctctatcaatcccgacaggaataccgttaccataaaatcattatctgccgttagccagctataccaacctgaaaaccatctagggctgcatcaagcagaacctgctgaaattaagtacgattatttaatcagtgctgtaggtgcggaacctaacacatttggtattcctggggtcactgattacggtcatttcctgaaggaaattcccaactctttggaaataagaagaacttttgccgccaatctagagaaggctaacttattgccaaagggtgatcccgaaagaagaagactactgtccattgtcgtggttggtggtgggcctactggtgtagaggccgctggtgaactacaggattatgttcaccaggacctgagaaagtttctccctgcattggccgaagaagtccaaattcacttggtcgaagctctgcccatcgttttgaatatgtttgagaaaaagctttcatcatacgcgcaatcacatttagaaaacacttcgatcaaagtacatctgagaacggctgtcgccaaagttgaagaaaagcaattgttggcaaagaccaaacacgaagacggtaaaataaccgaagaaactattccatacggtactttgatttgggccacgggtaacaaggcaagaccggtaatcactgaccttttcaagaaaattcctgagcaaaactcgtccaagagaggattggcagtgaatgactttttgcaggtgaaaggcagcaacaacattttcgccattggtgacaatgcatttgctgggttgccaccaaccgcccaagtagcgcaccaagaggccgaatatttggccaagaattttgataaaatggctcaaataccaaatttccaaaagaatctatcttcaagaaaggataaaattgatctcttgttcgaggagaacaactttaaacctttcaaatacaacgatttaggtgccttagcatacctgggatccgaaagggccattgcaaccatacgttccggtaagagaacattttacaccggtggtggcttaatgaccttctacttatggagaattttgtacatgtccatgattctatctgcaagatcgagattaaaggtctttttcgactggattaaaatggcatttttcaaaagagacttttttaaaggattatag

SEQ ID NO: 152 - DNA, 1542 bp, Artificial Sequence
  source: /note="Description of Artificial Sequence: Synthetic polynucleotide"
atgctatcgaagaatttgtatagtaacaagaggttgctcacctcgacgaatacgatggtcagattcgcttccaccagatccacaggggtggaaaactccggagcaggtcctacatcttttaagaccatgaaagtcattgaccctcagcacagcgacaaaccaaacgtgctgatactgggttcggggtggggagctatttcgtttttaaagcacattgacaccaagaagtacaacgtttccatcatctctcctagaagctatttcttatttacgcctttgttaccttctgcaccagttgggacagtagacgaaaagtcaattattgagcccatcgttaattttgctctcaagaaaaaggggaacgttacctactatgaggcagaagccacctctatcaatcccgacaggaataccgttaccataaaatcattatctgccgttagccagctataccaacctgaaaaccatctagggctgcatcaagcagaacctgctgaaattaagtacgattatttaatcagtgctgtaggtgcggaacctaacacatttggtattcctggggtcactgattacggtcatttcctggaggaaattcccaactctttggaaataagaagaacttttgccgccaatctagagaaggctaacttattgccaaagggtgatcccgaaagaagaagactactgtccattgtcgtggttggtggtgggcctactggtgtagaggccgctggtgaactacaggattatgttcaccaggacctgagaaagtttctccctgcattggccgaagaagtccaaattcacttggtcgaagctctgcccatcgttttgaatatgtttgagaaaaagctttcatcatacgcgcaatcacatttagaaaacacttcgatcaaagtacatctgagaacggctgtcgccaaagttgaagaaaagcaattgttggcaaagaccaaacacgaagacggtaaaataaccgaagaaactattccatacggtactttgatttgggccacgggtaacaaggcaagaccggtaatcactgaccttttcaagaaaattcctgagcaaaactcgtccaagagaggattggcagtgaatgactttttgcaggtgaaaggcagcaacaacattttcgccattggtgacaatgcatttgctgggttgccaccaaccgcccaagtagcgcaccaagaggccgaatatttggccaagaattttgataaaatggctcaaataccaaatttccaaaagaatctatcttcaagaaaggataaaattgatctcttgttcgaggagaacaactttaaacctttcaaatacaacgatttaggtgccttagcatacctgggatccgaaagggccattgcaaccatacgttccggtaagagaacattttacaccggtggtggcttaatgaccttctacttatggagaattttgtacttgtccatgattctatctgcaagatcgagattaaaggtctttttcgactggattaaattagcatttttcaaaagagacttttttaaaggattatag

SEQ ID NO: 153 - DNA, 1542 bp, Artificial Sequence
  source: /note="Description of Artificial Sequence: Synthetic polynucleotide"
atgctatcgaagaatttgtatagtaacaagaggttgctcacctcgacgaatacgatggtcagattcgcttccaccagatccacaggggtggaaaactccggagcaggtcctacatcttttaagaccatgaaagtcattgaccctcagcacagcgacaaaccaaacgtgctgatactgggttcggggtggggagctatttcgtttttaaagcacattgacaccaagaagtacaacgtttccatcatctctcctagaagctatttcttatttacgcctttgttaccttctgcaccagttgggacagtagacgaaaagtcaattattgagcccatcgttaattttgctctcaagaaaaaggggaacgttacctactatgaggcagaagccacctctatcaatcccgacaggaataccgttaccataaaatcattatctgccgttagccagctataccaacctgaaaaccatctagggctgcatcaagcagaacctgctgaaattaagtacgattatttaatcagtgctgtaggtgcggaacctaacacatttggtattcctggggtcactgattacggtcatttcctgaaggaaattcccaactctttggaaataagaagaacttttgccgccaatctagagaaggctaacttattgccaaagggtgatcccgaaagaagaagactactgtccattgtcgtggttggtggtgggcctactggtgtagaggccgctggtgaactacaggattatgttcaccaggacctgagaaagtttctccctgcattggccgaagaagtccaaattcacttggtcgaagctctgcccatcgttttgaatatgtttgagaaaaagctttcatcatacgcgcaatcacatttagaaaacacttcgatcaaagtacatctgagaacggctgtcgccaaagttgaagaaaagcaattgttggcaaagaccaaacacgaagacggtaaaataaccgaagaaactattccatacggtactttgatttgggccacgggtaacaaggcaagaccggtaatcactgaccttttcaagaaaattcctgagcaaaactcgtccaagagaggattggcagtgaatgactttttgcaggtgaaaggcagcaacaacattttcgccattggtgacaatgcatttgctgggttgccaccaaccgcccaagtagcgcaccaagaggccgaatatttggccaagaattttgataaaatggctcaaataccaaatttccaaaagaatctatcttcaagaaaggataaaattgatctcttgttcgaggagaacaactttaaacctttcaaatacaacgatttaggtgccttagcatacctgggatccgaaagggccattgcaaccatacgttccggtaagagaacattttacaccggtggtggcttaatgaccttctacttatggcagattttgtacttgtccatgattctatctgcaagatcgagattaaaggtctttttcgactggattaaattagcatttttcaaaagagacttttttaaaggattatag

SEQ ID NO: 154 - DNA, 1542 bp, Artificial Sequence
  source: /note="Description of Artificial Sequence: Synthetic polynucleotide"
atgctatcgaagaatttgtatagtaaccggaggttgctcacctcgacgaatacgctagtcagattcgcttccaccagatccacaggggtggaaaactccggagcaggtcctacatcttttaagaccatgaaagtcattgaccctcagcacagcgacaaaccaaacgtgctgatactgggttcggggtggggagctatttcgtttttaaagcacattgacaccaagaagtacaacgtttccatcatctctcctagaagctatttcttatttacgcctttgttaccttctgcaccagttgggacagtagacgaaaagtcaattattgagcccatcgttaattttgctctcaagaaaaaggggaacgttacctactatgaggcagaagccacctctatcaatcccgacaggaataccgttaccataaaatcattatctgccgttagccagctataccaacctgaaaaccatctagggctgcatcaagcagaacctgctgaaattaagtacgattatttaatcagtgctgtaggtgcggaacctaacacatttggtattcctggggtcactgattacggtcatttcctgaaggaaattcccaactctttggaaataagaagaacttttgccgccaatctagagaaggctaacttattgccaaagggtgatcccgaaagaagaagactactgtccattgtcgtggttggtggtgggcctactggtgtagaggccgctggtgaactacaggattatgttcaccaggacctgagaaagtttttccctgcattggccgaagaagtccaaattcacttggtcgaagctctgcccatcgttttgaatatgtttgagaaaaagctttcatcatacgcgcaatcacatttagaaaacacttcgatcaaagtacatctgagaacggctgtcgccaaagttgaagaaaagcaattgttggcaaagaccaaacacgaagacggtaaaataaccgaagaaactattccatacggtactttgatttgggccacgggtaacaaggcaagaccggtaatcactgaccttttcaagaaaattcctgagcaaaactcgtccaagagaggattggcagtgaatgactttttgcaggtgaaaggcagcaacaacattttcgccattggtgacaatgcatttgctgggttgccaccaaccgcccaagtagcgcaccaagaggccgaatatttggccaagaattttgataaaatggctcaaataccaaatttccaaaagaatctatcttcaagaaaggataaaattgatctcttgttcgaggagaacaactttaaacctttcaaatacaacgatttaggtgccttagcatacctgggatccgaaagggccattgcaaccatacgttccggtaagagaacattttacaccggtggtggcttaatgaccttctacttatggagaattttgtacttgtccatgattctatctgcaagatcgagattaaaggtctttttcgactggattaaattagcatttttcaaaagagacttttttaaaggattatag

SEQ ID NO: 155 - DNA, 1542 bp, Artificial Sequence
  source: /note="Description of Artificial Sequence: Synthetic polynucleotide"
atgctatcgaagaatttgtatagtaacaagaggttgctcacctcgacgaatacgctagtcagattcgcttccaccagatccacaggggtggaaaactccggagcaggtcctacatcttttaagaccatgaaagtcattgaccctcagcacagcgacaaaccaaacgtgctgatactgggttcggggtggggagctatttcgtttttaaagcacattgacaccaagaagtacaacgtttccatcatctctcctagaagctatttcttatttacgcctttgatgccttctgcaccagttgggacagtagacgaaaagtcaattattgagcccatcgttaattttgctctcaagaaaaaggggaacgttacctactatgaggcagaagccacctctatcaatcccgacaggaataccgttaccataaaatcattatctgccgttagccagctataccaacctgaaaaccatctagggatgcatcaagcagaacctgctgaaattaagtacgattatttaatcagtgctgtaggtgcggaacctaacacatttggtattcctggggtcactgattacggtcatttcctgaaggaaattcccaactctttggaaataagaagaacttttgccgccaatctagagaaggctaacttattgccaaagggtgatcccgaaagaagaagactactgtccattgtcgtggttggtggtgggcctactggtgtagaggccgctggtgaactacaggattatgttcaccaggacctgagaaagtttctccctgcattggccgaagaagtccaaattcacttggtcgaagctctgcccatcgttttgaatatgtttgagaaaaagctttcatcatacgcgcaatcacatttagaaaacacttcgatcaaagtacatctgagaacggctgtcgccaaagttgaagaaaagcaattgttggcaaagaccaaacacgaagacggtaaaataaccgaagaaactattccatacggtactttgatttgggccacgggtaacaaggcaagaccggtaatcactgaccttttcaagaaaattcctgagcaaaactcgtccaagagaggattggcagtgaatgactttttgcaggtgaaaggcagcaacaacattttcgccattggtgacaatgcatttgctgggttgccaccaaccgcccaagtagcgcaccaagaggccgaatatttggccaagaattttgataaaatggctcaaataccaaatttccaaaagaatctatcttcaagaaaggataaaattgatctcttgttcgaggagaacaactttaaacctttcaaatacaacgatttaggtgccttagcatacctgggatccgaaagggccattgcaaccatacgttccggtaagagaacattttacaccggtggtggcttaatgaccttctacttatggagaattttgtacttgtccatgattctatctgcaagatcgagattaaaggtctttttcgactggattaaattagcatttttcaaaagagacttttttaaaggattatag

SEQ ID NO: 156 - DNA, 1542 bp, Artificial Sequence
  source: /note="Description of Artificial Sequence: Synthetic polynucleotide"
atgctatcgaagaatttgtatagtaacaagaggttgctcacctcgacgaatacgctagtcagattcgcttccaccagatccacaggggtggaaaactccggagcaggtcctacatcttttaagaccatgaaagtcattgaccctcagcacagcgacaaaccaaacgtgctgatactgggttcggggtggggagctatttcgtttttaaagcacattgacaccaagaagtacaacgtttccatcatctctcctagaagctatttcttatttacgcctttgttaccttctgcaccagttgggacagtagacgaaaagtcaattattgagcccatcgttaattttgctctcaagaaaaaggggaacgttacctactatgaggcagaagccacctctatcaatcccgacaggaataccgttaccataaaatcattatctgccgttagccagctataccaacctgaaaaccatctagggctgcatcaagcagaacctgctgaaattaagtacgattatttaatcagtgctgtaggtgcggaacctaacacatttggtattcctggggtcactgattacggtcatttcctgaaggaaattcccaactctttggaaataagaagaacttttgccgccaatctagagaaggctaacttattgccaaagggtgatcccgaaagaagaagactactgtccattgtcgtggttggtggtgggcctactggtgtagaggccgctggtgaactacaggattatgttcaccaggacctgagaaagtttctccctgcattggccgaagaagtccaaattcacttggtcgaagctctgcccatcgttttgaatatgtttgagaaagagctttcatcatacgcgcaatcacatttagaaaacacttcgatcaaagtacatctgagaacggctgtcgccaaagttgaagaaaagcaattgttggcaaagaccaaacacgaagacggtaaaataaccgaagaaactattccatacggtactttgatttgggccacgggtaacaaggcaagaccggtaatcactgaccttttcaagaaaattcctgagcaaaactcgtccaagagaggattggcagtgaatgactttttgcaggtgaaaggcagcaacaacattttcgccattggtgacaatgcatttgctgggttgccaccaaccgcccaagtagcgcaccaagaggccgaatatttggccaagaattttgataaaatggctcaaataccaaatttccaaaagaatctatcttcaagaaaggataaaattgatctcttgttcgaggagaacaactttaaacctttcaaatacaacgatttaggtgccttagcatacctgggatccgaaagggccattgcaaccatacgttccggtaagagaacattttacaccggtggtggcttaatgaccttctacttatggagaattttgtacttgtccatgattctatctgcaagatcgagattaaaggtctttttcgactggattaaattagcatttttcaaaagagacttttttgagggattatag

SEQ ID NO: 157 - DNA, 1542 bp, Artificial Sequence
  source: /note="Description of Artificial Sequence: Synthetic polynucleotide"
atgctatcgaagaatttgtatagtaacaagaggttgctcacctcgacgaatacgctagtcagattcgcttccaccagatccacaggggtggaaaactccggagcaggtcctacatcttttaagaccatgaaagtcattgaccctcagcacagcgacaaaccaaacgtgctgatactgggttcggggtggggagctatttcgtttttaaagcacattgacaccaagaagtacaacgtttccatcatctctcctagaagctatttcttatttacgcctttgttaccttctgcaccagttgggacagtagacgaaaagtcaattattgagcccatcgttaattttgctctcaagaaaaaggggaacgttacctactatgaggcagaagccacctctatcaatcccgacaggaataccgttaccataaaatcattatctgccgttagccagctataccaacctgaaaaccatctagggctgcatcaagcagaacctgctgaaattaagtacgattatttaatcagtgctgtaggtgcggaacctaacacatttggtattcctggggtcactgattacggtcatttcttcaaggaaattcccaactctttggaaataagaagaacttttgccgccaatctagagaaggctaacttattgccaaagggtgatcccgaaagaagaagactactgtccattgtcgtggttggtggtgggcctactggtgtagaggccgctggtgaactacaggattatgttcaccaggacctgagaaagtttctccctgcattggccgaagaagtccaaattcacttggtcgaagctctgcccatcgttttgaatatgtttgagaaaaagctttcatcatacgcgcaatcacatttagaaaacacttcgatcaaagtacatctgagaacggctgtcgccaaagttgaagaaaagcaattgttggcaaagaccaaacacgaagacggtaaaataaccgaagaaactattccatacggtactttgatttgggccacgggtaacaaggcaagaccggtaatcactgaccttttcaagaaaattcctgagcaaaactcgtccaagagaggattggcagtgaatgactttttgcaggtgaaaggcagcaacaacattttcgccattggtgacaatgcatttagcgggttgccaccaaccgcccaagtagcgcaccaagaggccgaatatttggccaagaattttgataaaatggctcaaataccaaatttccaaaagaatctatcttcaagaaaggataaaattgatctcttgttcgaggagaacaactttaaacctttcaaatacaacgatttaggtgccttagcatacctgggatccgaaagggccattgcaaccatacgttccggtaagagaacattttacaccggtggtggcttaatgaccttctacttatggagaattttgtacttgtccatgattctatctgcaagatcgagattaaaggtctttttcgactggattaaattagcatttttcaaaagagacttttttaaaggattatag

SEQ ID NO: 158 - DNA, 1542 bp, Artificial Sequence
  source: /note="Description of Artificial Sequence: Synthetic polynucleotide"
atgctatcgaagaatttgtatagtaacaagaggttgctcacctcgacgaatacgctagtcagattcgcttccaccagatccacaggggtggaaaactccggagcaggtcctacatcttttaagaccatgaaagtcattgaccctcagcacagcgacaaaccaaacgtgctgatactgggttcggggtggggagctatttcgtttttaaagcacattgacaccaagaagtacaacgtttccatcatctctcctagaagctatttcttatttacgcctttgttaccttctgcaccagttgggacagtagacgaaaagtcaattattgagcccatcgttaattttgctctcaagaaaaaggggaacgttacctactatgaggcagaagccacctctatcaatcccgacaggaataccgttaccataaaatcattatctgccgttagccagctataccaacctgaaaaccatctagggctgcatcaagcagaacctgctgaaattaagtacgattatttaatcagtgctgtaggtgcggaacctaacacatttggtattcctggggtcactgattacggtcatttcttcaaggaaattcccaactctttggaaataagaagaacttttgccgccaatctagagaaggctaacttattgccaaagggtgatcccgaaagaagaagactactgtccattgtcgtggttggtggtgggcctactggtgtagaggccgctggtgaactacaggattatgttcaccaggacctgagaaagtttctccctgcattggccgaagaagtccaaattcacttggtcgaagctctgcccatcgttttgaatatgtttgagaaaaagctttcatcatacgcgcaatcacatttagaaaacacttcgatcaaagtacatctgagaacggctgtcgccaaagttgaagaaaagcaattgttggcaaagaccaaacacgaagacggtaaaataaccgaagaaactattccatacggtactttgatttgggccacgggtaacaaggcaagaccggtaatcactgaccttttcaagaaaattcctgagcaaaactcgtccaagagaggattggcagtgaatgactttttgcaggtgaaaggcagcaacaacattttcgccattggtgacaatgcatttgctgggttgccaccaaccgcccaagtagcgcaccaagaggccgaatatatcgccaagaattttgataaaatggctcaaataccaaatttccaaaagaatctatcttcaagaaaggataaaattgatctcttgttcgaggagaacaactttaaacctttcaaatacaacgatttaggtgccttagcatacctgggatccgaaagggccattgcaaccatacgttccggtaagagaacattttacaccggtggtggcttaatgaccttctacttatggagaattttgtacttgtccatgattctatctgcaagatcgagattaaaggtctttttcgactggattaaattagcatttttcaaaagagacttttttaaaggattatag

SEQ ID NO: 159 - DNA, 1542 bp, Artificial Sequence
  source: /note="Description of Artificial Sequence: Synthetic polynucleotide"
atgctatcgaagaatttgtatagtaacaagaggttgctcacctcgacgaatacgatggtcagattcgcttccaccagatccacaggggtggaaaactccggagcaggtcctacatcttttaagaccatgaaagtcattgaccctcagcacagcgacaaaccaaacgtgctgatactgggttcggggtggggagctatttcgtttttaaagcacattgacaccaagaagtacaacgtttccatcatctctcctagaagctatttcttatttacgcctttgttaccttctgcaccagttgggacagtagacgaaaagtcaattattgagcccatcgttaattttgctctcaagaaaaaggggaacgttacctactatgaggcagaagccacctctatcaatcccgacaggaataccgttaccataaaatcattatctgccgttagccagctataccaacctgaaaaccatctagggctgcatcaagcagaacctgctgaaattaagtacgattatttaatcagtgctgtaggtgcggaacctaacacatttggtattcctggggtcactgattacggtcatttcttcaaggaaattcccaactctttggaaataagaagaacttttgccgccaatctagagaaggctaacttattgccaaagggtgatcccgaaagaagaagactactgtccattgtcgtggttggtggtgggcctactggtgtagaggccgctggtgaactacaggattatgttcaccaggacctgagaaagtttctccctgcattggccgaagaagtccaaattcacttggtcgaagctctgcccatcgttttgaatatgtttgagaaaaagctttcatcatacgcgcaatcacatttagaaaacacttcgatcaaagtacatctgagaacggctgtcgccaaagttgaagaaaagcaattgttggcaaagaccaaacacgaagacggtaaaataaccgaagaaactattccatacggtactttgatttgggccacgggtaacaaggcaagaccggtaatcactgaccttttcaagaaaattcctgagcaaaactcgtccaagagaggattggcagtgaatgactttttgcaggtgaaaggcagcaacaacattttcgccattggtgacaatgcatttgctgggttgccaccaaccgcccaagtagcgcaccaagaggccgaatatttggccaagaattttgataaaatggctcaaataccaaatttccaaaagaatctatcttcaagaaaggataaaattgatctcttgttcgaggagaacaactttaaacctttcaaatacaacgatttaggtgccttagcatacctgggatccgaaagggccattgcaaccatacgttccggtaagagaacattttacaccggtggtggcttaatgaccttctacttatggagaattttgtacttgtccatgattctatctgcaagatcgagattaaaggtctttttcgactggattaaattagcatttttcaaaagagacttttttaaaggattatag

SEQ ID NO: 160 - DNA, 1542 bp, Artificial Sequence
  source: /note="Description of Artificial Sequence: Synthetic polynucleotide"
atgctatcgaagaatttgtatagtaacaagaggttgctcacctcgacgaatacgctagtcagattcgcttccaccagatccacaggggtggaaaactccggagcaggtcctacatcttttaagaccatgaaagtcattgaccctcagcacagcgacaaaccaaacgtgctgatactgggttcggggtggggagctatttcgtttttaaagcacattgacaccaagaagtacaacgtttccatcatctctcctagaagctatttcttatttacgcctttgttaccttctgcaccagttgggacagtagacgaaaagtcaattattgagcccatcgttaattttgctctcaagaaaaaggggaacgttacctactatgaggcagaagccacctctatcaatcccgacaggaataccgttaccataaaatcattatctgccgttagccagctataccaacctgaaaaccatctagggctgcatcaagcagaacctgctgaaattaagtacgattatttaatcagtgctgtaggtgcggaacctaacacatttggtattcctggggtcactgattacggtcatttcctgaaggaaattcccaactctttggaaataagaagaacttttgccgccaatctagagaaggctaacttattgccaaagggtgatcccgaaagaagaagactactgtccattgtcgtggttggtggtgggcctactggtgtagaggccgctggtgaactacaggattatgttcaccaggacctgagaaagtttctccctgcattggccgaagaagtccaaattcacttggtcgaagctctgcccatcgttttgaatatgtttgagaaagagctttcatcatacgcgcaatcacatttagaaaacacttcgatcaaagtacatctgagaacggctgtcgccaaagttgaagaaaagcaattgttggcaaagaccaaacacgaagacggtaaaataaccgaagaaactattccatacggtactttgatttgggccacgggtaacaaggcaagaccggtaatcactgaccttttcaagaaaattcctgagcaaaactcgtccaagagaggattggcagtgaatgactttttgcaggtgaaaggcagcaacaacattttcgccattggtgacaatgcatttgctgggttgccaccaaccgcccaagtagcgcaccaagaggccgaatatatcgccaagaattttgataaaatggctcaaataccaaatttccaaaagaatctatcttcaagaaaggataaaattgatctcttgttcgaggagaacaactttaaacctttcaaatacaacgatttaggtgccttagcatacctgggatccgaaagggccattgcaaccatacgttccggtaagagaacattttacaccggtggtggcttaatgaccttctacttatggagaattttgtacttgtccatgattctatctgcaagatcgagattaaaggtctttttcgactggattaaattagcatttttcaaaagagacttttttaaaggattatag

SEQ ID NO: 161 - DNA, 1542 bp, Artificial Sequence
  source: /note="Description of Artificial Sequence: Synthetic polynucleotide"
atgctatcgaagaatttgtatagtaacaagaggttgctcacctcgacgaatacgctagtcagattcgcttccaccagatccacaggggtggaaaactccggagcaggtcctacatcttttaagaccatgaaagtcattgaccctcagcacagcgacaaaccaaacgtgctgatactgggttcggggtggggagctatttcgtttttaaagcacattgacaccaagaagtacaacgtttccatcatctctcctagaagctatttcttatttacgcctttgttaccttctgcaccagttgggacagtagacgaaaagtcaattattgagcccatcgttaattttgctctcaagaaaaaggggaacgttacctactatgaggcagaagccacctctatcaatcccgacaggaataccgttaccataaaatcattatctgccgttagccagctataccaacctgaaaaccatctagggctgcatcaagcagaacctgctgaaattaagtacgattatttaatcagtgctgtaggtgcggaacctaacacatttggtattcctggggtcactgattacggtcatttcctgaaggaaattcccaactctttggaaataagaagaacttttgccgccaatctagagaaggctaacttattgccaaagggtgatcccgaaagaagaagactactgtccattgtcgtggttggtggtgggcctactggtgtagaggccgctggtgaactacaggattatgttcaccaggacctgagaaagtttctccctgcattggccgaagaagtccaaattcacttggtcgaagctctgcccatcgttttgaatatgtttgagaaaaagctttcatcatacgcgcaatcacatttagaaaacacttcgatcaaagtacatctgagaacggctgtcgccaaagttgaagaaaagcaattgttggcaaagaccaaacacgaagacggtaaaataaccgaagaaactattccatacggtactttgatttgggccacgggtaacaaggcaagaccggtaatcactgaccttttcaagaaaattcctgagcaaaactcgtccaagagaggattggcagtgaatgactttttgcaggtgaaaggcagcaacaacattttcgccattggtgacaatgcatttgctgggttgccaccaaccgcccaagtagcgcaccaagaggccgaatatttggccaagaattttgataaaatggctcaaataccaaatttccaaaagaatctatcttcaagaaaggataaaattgatctcttgttcgaggagaacaactttaaacctttcaaatacaacgatttaggtgccttagcatacctgggatccgaaagggccattgcaaccatacgttccggtaagagaacattttacaccggtggtggcttaatgaccttctacttatggcagattttgtacttgtccatgattctatctgcaagatcgagattaaaggtctttttcgactggattaaaatggcatttttcaaaagagacttttttaaaggattatag

SEQ ID NO: 162 - DNA, 1542 bp, Artificial Sequence
  source: /note="Description of Artificial Sequence: Synthetic polynucleotide"
atgctatcgaagaatttgtatagtaacaagaggttgctcacctcgacgaatacgctagtcagattcgcttccaccagatccacaggggtggaaaactccggagcaggtcctacatcttttaagaccatgaaagtcattgaccctcagcacagcgacaaaccaaacgtgctgatactgggttcggggtggggagctatttcgtttttaaagcacattgacaccaagaagtacaacgtttccatcatctctcctagaagctatttcttatttacgcctttgttaccttctgcaccagttgggacagtagacgaaaagtcaattattgagcccatcgttaattttgctctcaagaaaaaggggaacgttacctactatgaggcagaagccacctctatcaatcccgacaggaataccgttaccataaaatcattatctgccgttagccagctataccaacctgaaaaccatctagggctgcatcaagcagaacctgctgaaattaagtacgattatttaatcagtgctgtaggtgcggaacctaacacatttggtattcctggggtcactgattacggtcatttcctggaggaaattcccaactctttggaaataagaagaacttttgccgccaatctagagaaggctaacttattgccaaagggtgatcccgaaagaagaagactactgtccattgtcgtggttggtggtgggcctactggtgtagaggccgctggtgaactacaggattatgttcaccaggacctgagaaagtttctccctgcattggccgaagaagtccaaattcacttggtcgaagctctgcccatcgttttgaatatgtttgagaaagagctttcatcatacgcgcaatcacatttagaaaacacttcgatcaaagtacatctgagaacggctgtcgccaaagttgaagaaaagcaattgttggcaaagaccaaacacgaagacggtaaaataaccgaagaaactattccatacggtactttgatttgggccacgggtaacaaggcaagaccggtaatcactgaccttttcaagaaaattcctgagcaaaactcgtccaagagaggattggcagtgaatgactttttgcaggtgaaaggcagcaacaacattttcgccattggtgacaatgcatttgctgggttgccaccaaccgcccaagtagcgcaccaagaggccgaatatttggccaagaattttgataaaatggctcaaataccaaatttccaaaagaatctatcttcaagaaaggataaaattgatctcttgttcgaggagaacaactttaaacctttcaaatacaacgatttaggtgccttagcatacctgggatccgaaagggccattgcaaccatacgttccggtaagagaacattttacaccggtggtggcttaatgaccttctacttatggagaattttgtacttgtccatgattctatctgcaagatcgagattaaaggtctttttcgactggattaaattagcatttttcaaaagagacttttttaaaggattatag

SEQ ID NO: 163 - DNA, 1542 bp, Artificial Sequence
  source: /note="Description of Artificial Sequence: Synthetic polynucleotide"
atgctatcgaagaatttgtatagtaacaagaggttgctcacctcgacgaatacgctagtcagattcgcttccaccagatccacaggggtggaaaactccggagcaggtcctacatcttttaagaccatgaaagtcattgaccctcagcacagcgacaaaccaaacgtgctgatactgggttcggggtggggagctatttcgtttttaaagcacattgacaccaagaagtacaacgtttccatcatctctcctagaagctatttcttatttacgcctttgttaccttctgcaccagttgggacagtagacgaaaagtcaattattgagcccatcgttaattttgctctcaagaaaaaggggaacgttacctactatgaggcagaagccacctctatcaatcccgacaggaataccgttaccataaaatcattatctgccgttagccagctataccaacctgaaaaccatctagggctgcatcaagcagaacctgctgaaattaagtacgattatttaatcagtgctgtaggtgcggaacctaacacatttggtattcctggggtcactgattacggtcatttcttcaaggaaattcccaactctttggaaataagaagaacttttgccgccaatctagaggaggctaacttattgccaaagggtgatcccgaaagaagaagactactgtccattgtcgtggttggtggtgggcctactggtgtagaggccgctggtgaactacaggattatgttcaccaggacctgagaaagtttctccctgcattggccgaagaagtccaaattcacttggtcgaagctctgcccatcgttttgaatatgtttgagaaaaagctttcatcatacgcgcaatcacatttagaaaacacttcgatcaaagtacatctgagaacggctgtcgccaaagttgaagaaaagcaattgttggcaaagaccaaacacgaagacggtaaaataaccgaagaaactattccatacggtactttgatttgggccacgggtaacaaggcaagaccggtaatcactgaccttttcaagaaaattcctgagcaaaactcgtccaagagaggattggcagtgaatgactttttgcaggtgaaaggcagcaacaacattttcgccattggtgacaatgcatttgctgggttgccaccaaccgcccaagtagcgcaccaagaggccgaatatttggccaagaattttgataaaatggctcaaataccaaatttccaaaagaatctatcttcaagaaaggataaaattgatctcttgttcgaggagaacaactttaaacctttcaaatacaacgatttaggtgccttagcatacctgggatccgaaagggccattgcaaccatacgttccggtaagagaacattttacaccggtggtggcttaatgaccttctacttatggagaattttgtacttgtccatgattctatctgcaagatcgagattaaaggtctttttcgactggattaaattagcatttttcaaaagagacttttttaaaggattatag

SEQ ID NO: 164 - DNA, 1542 bp, Artificial Sequence
  source: /note="Description of Artificial Sequence: Synthetic polynucleotide"
atgctatcgaagaatttgtatagtaacaagaggttgctcacctcgacgaatacgctagtcagattcgcttccaccagatccacaggggtggaaaactccggagcaggtcctacatcttttaagaccatgaaagtcattgaccctcagcacagcgacaaaccaaacgtgctgatactgggttcggggtggggagctatttcgtttttaaagcacattgacaccaagaagtacaacgtttccatcatctctcctagaagctatttcttatttacgcctttgttaccttctgcaccagttgggacagtagacgaaaagtcaattattgagcccatcgttaattttgctctcaagaaaaaggggaacgttacctactatgaggcagaagccacctctatcaatcccgacaggaataccgttaccataaaatcattatctgccgttagccagctataccaacctgaaaaccatctagggctgcatcaagcagaacctgctgaaattaagtacgattatttaatcagtgctgtaggtgcggaacctaacacatttggtattcctggggtcactgattacggtcatttcctgaaggaaattcccaactctttggaaataagaagaacttttgccgccaatctagaggaggctaacttattgccaaagggtgatcccgaaagaagaagactactgtccattgtcgtggttggtggtgggcctactggtgtagaggccgctggtgaactacaggattatgttcaccaggacctgagaaagtttctccctgcattggccgaagaagtccaaattcacttggtcgaagctctgcccatcgttttgaatatgtttgagaaagagctttcatcatacgcgcaatcacatttagaaaacacttcgatcaaagtacatctgagaacggctgtcgccaaagttgaagaaaagcaattgttggcaaagaccaaacacgaagacggtaaaataaccgaagaaactattccatacggtactttgatttgggccacgggtaacaaggcaagaccggtaatcactgaccttttcaagaaaattcctgagcaaaactcgtccaagagaggattggcagtgaatgactttttgcaggtgaaaggcagcaacaacattttcgccattggtgacaatgcatttgctgggttgccaccaaccgcccaagtagcgcaccaagaggccgaatatttggccaagaattttgataaaatggctcaaataccaaatttccaaaagaatctatcttcaagaaaggataaaattgatctcttgttcgaggagaacaactttaaacctttcaaatacaacgatttaggtgccttagcatacctgggatccgaaagggccattgcaaccatacgttccggtaagagaacattttacaccggtggtggcttaatgaccttctacttatggagaattttgtacttgtccatgattctatctgcaagatcgagattaaaggtctttttcgactggattaaattagcatttttcaaaagagacttttttaaaggattatag

SEQ ID NO: 165 - DNA, 1542 bp, Artificial Sequence
  source: /note="Description of Artificial Sequence: Synthetic polynucleotide"
atgctaagcaagaacttgtatagcaacaagcggttgctcaccagcaccaacaccctagtcagattcgcttccaccagatccacaggcgtcgaaaactccggggctggtcctacaagcttcaagaccatgaaggtcattgaccctcagcacagcgacaaaccaaacgtgctgatcctgggctctgggtggggagctatttcgtttttaaagcacattgacaccaagaagtacaacgtttccatcatctctcccagaagctatttcttatttacgcccttgttaccttctgccccagtggggacagtagacgagaagtcaatcatcgagcccatcgtgaatttcgctctcaagaaaaagggcaacgttacctactacgaggcagaggccacctctatcaatcccgacaggaataccgttaccatcaagtcattatctgccgttagccagctgtaccaacctgaaaaccatctagggctgcatcaagcagagcctgctgaaattaagtacgattatttaatcagtgctgtaggtgcggagcctaacacctttggtattcccggggtcaccgattacggtcatttcctggaggaaattcccaacagcttggaaatacggcggacttttgccgccaatctagaaaaggctaacttactgccaaagggtgatcccgaaagaagaaggctactgtccattgtcgtggtgggcggtggccctacaggcgtagaggctgctggtgaactgcaggactacgttcaccaggacctgcggaagtttctgcccgccttggccgaagaagtccaaattcacttggtcgaagctctgcccatcgtgctgaacatgtttgagaaaaagctgagcagctacgcgcagtcacatctggaaaacacttcgatcaaagtacatctgagaacggctgtcgccaaagtggaagagaagcaattgttggcaaagaccaaacacgaggacggtaaaattaccgaagaaactatcccatacggtaccttgatttgggccacgggtaacaaggcaagaccggtaatcactgacctgttcaagaagattcctgagcaaaactcgagcaagagaggattggcagtgaatgactttctgcaggtgaaaggcagcaacaacatcttcgccattggtgacaacgcatttgctgggttgccacctacagcccaggtagcccaccaagaggccgaatatttggccaagaatttcgacaaaatggctcaaataccaaatttccaaaagaacctgtcttccagaaaggataagattgatctgttgttcgaggagaacaactttaaacctttcaaatacaacgatttaggtgccttagcatacctgggatccgaaagggccattgcaaccatccgtagcggtaagcggaccttttacaccggtggtggcttaatgaccttctacctgtggcagattttgtacttgagcatgatcctatctgcaagatcgagattaaaggtgtttttcgactggattaagctggcatttttcaagagagacttttttaaaggattatag

SEQ ID NO: 166 - DNA, 1542 bp, Artificial Sequence
  source: /note="Description of Artificial Sequence: Synthetic polynucleotide"
atgctaagcaagaacttgtatagcaacaagaggttgctgacctcgacgaatacgctagtcagattcgcttccaccagatccacaggggtcgaaaactccggagctggccctacatcttttaagaccatgaaagtcattgaccctcagcacagcgacaaacccaacgtgctgatcctgggttcgggctggggcgctatcagctttctgaagcacattgacaccaagaagtacaacgtttccatcatctctcctagaagctatttcctgcacacccctctgttaccttctgcaccagttgggacagtagacgaaaagtcaattattgagcccatcgttaattttgctctcaagaaaaaggggaacgttacctactatgaggcagaagccacctctatcaaccccgacaggaacaccgttaccataaaaagcctgtctgccgttagccagctgtaccagcccgagaaccatctagggctgcatcaggcagaacctgccgaaattaagtacgattacctgatcagtgctgtgggtgcggaacctaacacatttggtattcctggggtcactgactacggtcacttcctgaaggaaatccccaactctctggaaatcagaagaacttttgccgccaatctggagaaggccaacctgttgcctaagggcgatcccgaaagaagaaggctactgtccattgtcgtggttggtggaggccctactggtgtggaggccgctggcgaactacaggattacgttcaccaggacctgcggaagtttctgcccgcactggccgaggaagtccaaattcacttggtcgaagctctgcccatcgttctgaacatgtttgagaagaagctttcaagctacgcgcaaagccatctggaaaacacttcgatcaaagtacacctgagaacggctgtcgccaaggttgaagaaaagcagttgttggcaaagaccaagcacgaagacggtaaaataaccgaagaaaccattccatacggcactttgatttgggccacgggtaacaaggcaagaccggtgatcactgaccttttcaagaagatccctgagcagaactcgtccaagagaggcctggccgtgaatgactttttgcaggtgaaaggcagcaacaacattttcgccattggtgacaacgcctttgctgggttgccacctaccgcccaagtggcgcaccaagaagccgaatatttggccaagaacttcgataagatggctcagatacccaatttccagaagaacctgtcttcaagaaaggataagattgatctcttgttcgaggagaacaactttaaacccttcaaatacaacgacctgggtgccctggcatacctgggaagcgaaagggccattgcaaccatacgtagcggtaagagaaccttttacaccggtggtggcctgatgaccttctacttatggcggattttgtacttgtccatgattctatctgcaagatcgagactgaaggtgtttttcgactggattaaaatggcattcttcaaaagagacttcttcaaaggcttatag

SEQ ID NO: 167 - DNA, 1542 bp, Artificial Sequence
  source: /note="Description of Artificial Sequence: Synthetic polynucleotide"
atgctatcgaagaatttgtatagtaacaagaggttgctcacctcgacgaacacgctagtgagattcgctagcaccagatccaccggcgtggaaaacagcggggctggtcctacctctttcaagaccatgaaagtcattgacccccagcacagcgacaaaccaaacgtgctgatactgggctcgggctggggagctatctcgtttttaaagcacatcgacaccaagaagtacaacgtttccatcatctctcctagaagctatttcttattcacgcctctgttaccttctgcaccagttggaacagtagacgaaaagtccatcattgagcccatcgttaactttgctctcaagaaaaagggcaacgtcacctactacgaggcagaagccacctctatcaatcccgaccggaataccgttaccataaagagcttatctgccgtttcccagctataccagcctgaaaaccacctagggctgcatcaggcagaacctgctgagattaagtacgattatttaatcagtgctgtaggtgccgagcctaacacctttggaatccctggcgtcaccgattacggtcatttcctggaggaaattcccaacagcttggaaatacggagaacttttgccgccaatctagagaaggctaacttattgccaaagggtgatcccgaaagaagaaggctgctgagcatcgtcgtggttggcggaggccccactggcgtagaagccgctggcgaactgcaggattatgttcaccaggacctgagaaagtttctgcctgcattggccgaagaagtccaaattcacctggtcgaagctctgcccatcgttttgaacatgtttgagaaaaagcttagctcatacgcgcaatcacatttagaaaacacttcgatcaaagtacatctgagaacggctgtcgccaaggttgaagaaaagcaattgttggcaaagaccaagcacgaagacggtaaaataaccgaagaaactattccatacggcactctgatttgggccaccggtaacaaggcaagaccggtaatcactgacctgttcaagaaaatccctgagcaaaactcgtccaagagaggcctggcagtgaacgacttcttgcaggtcaaaggcagcaacaacattttcgccattggcgacaatgcctttgctggcctgcctcctaccgcccaagtagcgcaccaagaagccgaatatttggccaagaattttgataagatggctcagataccaaatttccagaagaacctgtcttcacggaaggataagattgatctgttgttcgaggagaacaactttaagcctttcaaatacaacgatttaggtgccttagcctacctgggatccgaaagagccattgcaaccatacgttccggcaagagaaccttctacaccggtggaggcttaatgaccttctacctgtggcagattttgtacttgtccatgattctatctgccagaagcagattaaaggtcttcttcgactggatcaaattagcctttttcaaaagagacttttttaagggcttatga

SEQ ID NO: 168 - DNA, 1542 bp, Artificial Sequence
  source: /note="Description of Artificial Sequence: Synthetic polynucleotide"
atgctatcgaagaatctgtatagtaacaagcggttgctcacctcgacgaacaccctcgtgcgcttcgcttccaccagatccaccggcgtggaaaactccggggcaggtcccacatcttttaagaccatgaaggtcatcgaccctcagcacagcgacaagcccaacgtgctgatactgggttctgggtggggagctatctcgtttctgaagcacattgacaccaagaagtacaacgtcagcatcatctctcctagaagctacttcttatttacgcctctgttaccctctgcacctgtggggacagtagacgaaaagtcaattattgagcccatcgttaatttcgccctgaagaaaaagggcaacgtcacctactacgaggccgaggccacctctatcaatcccgacaggaataccgttaccataaaatcattatctgccgtttcccagctataccaacccgaaaaccatctggggctgcatcaagcagaacctgctgaaattaagtacgactacctgatcagtgctgtaggtgcggagcctaacacatttggtatccctggggtcactgactacggtcatttcctgaaggaaattcccaactctttggaaatccggagaacttttgccgccaatctagagaaggctaacttattgccaaagggcgaccccgagagaagaagactactgtccattgtggtcgttggtggagggcctactggtgtagaggccgctggcgaactacaggactatgttcaccaggacctgagaaagtttctccccgccctggccgaagaagtgcaaattcacttggtggaagctctgcccatcgttttgaacatgtttgagaaagagctttcatcatacgcccaatcacacctggaaaacacttcgatcaaagtacatctgagaacggccgtcgccaaagttgaagagaagcaactgttggcaaagaccaagcacgaggacggtaaaataaccgaagaaactattccctacggcactctgatttgggccaccggtaacaaggccagaccggtaatcactgaccttttcaagaagatccccgagcaaaacagctccaagagaggactggcagtgaatgactttttgcaggtgaaaggcagcaacaacatcttcgccatcggcgacaatgcatttgctgggttgccacctaccgcccaagtggcgcaccaagaggccgaatatatcgccaagaattttgataaaatggcccagatacccaatttccaaaagaacctatcttcaagaaaggataagatcgatctcttgttcgaggaaaacaactttaaacctttcaagtacaacgatttaggtgccttagcatacctgggatccgaaagagccattgcaaccatacgtagcggcaagagaacattttacaccggtggtggcttaatgaccttctacttatggagaattctgtacctgtccatgattctgtctgcaagatcgagattaaaggtctttttcgactggatcaaactggcattcttcaaaagagacttttttaaaggactgtag

SEQ ID NO: 169 - DNA, 1542 bp, Artificial Sequence
  source: /note="Description of Artificial Sequence: Synthetic polynucleotide"
atgctatcgaagaacctgtacagtaacaagaggttgctcaccagcacgaacacgatggtcagattcgcttccaccagatccacaggcgtcgaaaactccggagctggtcccacatctttcaagaccatgaaagtcatcgaccctcagcacagcgacaaacccaacgtgctgatcctgggttctggctggggcgctatctcgtttttaaagcacatcgacaccaagaagtacaacgtctccatcatctctcccagaagctatttcttatttacccctttgctgccttctgcacctgtgggaaccgtagacgaaaagtcaattattgagcccatcgttaattttgctctcaagaaaaagggcaacgttacctactacgaggcagaagccaccagcatcaatcccgacaggaataccgttaccatcaagtcattatctgccgtttcccagctataccagcctgaaaaccatctagggctgcatcaagccgaacctgctgaaattaagtacgattatttaatcagtgctgtgggcgcggaacccaacacatttggtattcccggggtcactgattacggtcatttcttcaaggaaattcccaactctttggaaatccggcggacttttgccgccaatctagagaaggctaacttattgcctaagggtgaccccgagagaagaagactactgtccattgtcgtggtgggtggtggccctactggcgtagaagccgctggtgaactacaggattatgttcaccaggacctgagaaagtttctccccgccctggccgaagaagtccaaattcacttggtcgaagctctgcccatcgtgttgaatatgtttgagaaaaagcttagctcatacgcccaatcacatttagaaaacacttcgatcaaggtacatctgagaacggctgtggccaaagttgaagaaaagcaactgttggcaaagaccaaacacgaagacggtaaaataaccgaagaaaccatcccatacggtactttgatttgggccacgggtaacaaggccagaccggtgatcactgaccttttcaagaagattcccgagcaaaactcgtccaagagaggcctggccgtgaatgactttttgcaggtcaaaggcagcaacaacatcttcgccatcggtgacaacgcctttgctgggctgccaccaacagcccaggtggcgcaccaggaggccgaatatctggccaagaatttcgataaaatggcccaaatccccaatttccaaaagaacctatcttcacggaaggataaaattgatctgttgttcgaggaaaacaacttcaaacctttcaaatacaacgacttaggcgccctggcatacctgggaagcgaaagggccattgccaccatccgttccggtaagagaacattttacaccggtggtggcttaatgaccttctacttatggcggatcctgtacctgtccatgattctatctgcaagatcgagattaaaggtcttcttcgactggattaaactggcatttttcaagagagacttttttaaaggactgtag

SEQ ID NO: 170 - DNA, 1542 bp, Artificial Sequence
  source: /note="Description of Artificial Sequence: Synthetic polynucleotide"
atgctatcgaagaatttgtatagcaacaagaggctgctcaccagcaccaatacgctcgtcagattcgcctccaccagatccacaggggtggaaaactccggagcaggtcctacaagctttaagaccatgaaggtcatcgaccctcagcacagcgacaagccaaacgtgctgatcctgggctctggctggggagccattagctttctgaagcacattgacaccaagaagtacaacgtctccatcatctctcccagaagctacttcttattcacgcctctgttaccctctgccccagttgggacagtagacgaaaagtccatcattgagcccatcgttaatttcgccctcaagaaaaaggggaacgttacctactatgaggccgaagccacctctatcaaccccgaccggaacaccgttaccataaaatcactgtctgccgttagccagctataccaacctgaaaaccatctaggcctgcaccaggcagagcctgctgaaattaagtacgattatttaatcagtgctgtgggtgcggaacccaacacatttggtattcctggggtcactgactacggccacttcctggaggagattcccaactctctggaaataagaagaacctttgccgccaatctagaaaaggccaacttactgccaaagggcgaccccgaaagaagaaggctactgagcattgtggtcgttggtggtgggcctactggtgtggaggccgctggtgaactacaggactatgttcaccaggacctgagaaagtttttccctgcattggccgaagaagtccaaattcacctggtcgaagccctgcccatcgttttgaatatgttcgagaaaaagctgtcatcatacgcccaatcacatttagaaaacacttcgatcaaggtacacctgagaacggctgtcgccaaagtggaagaaaagcagttgttggcaaagaccaaacacgaagacggtaaaataaccgaggaaaccattccatacggcactttgatttgggccacgggtaacaaggccagaccggtaatcactgaccttttcaagaaaatccctgagcaaaactcgagcaagagaggattggcagtgaacgactttctgcaggtgaaaggcagcaacaacattttcgccattggtgacaacgcatttgctgggttgccaccaaccgcccaggtagcgcaccaagaggccgaatatttggccaagaattttgataaaatggcccaaatcccaaatttccagaagaatctgtcttccagaaaggataaaattgatctcttgttcgaggaaaacaactttaagcctttcaaatacaacgacttaggtgccctggcatacctgggctccgaaagggccattgcaaccataagatccggtaagagaaccttttacaccggtggaggcttaatgaccttctacttatggagaatcctgtacctgagcatgattctatctgcacgcagcagactgaaggtctttttcgactggatcaaactggcctttttcaaaagagactttttcaaaggattatag

SEQ ID NO: 171 - DNA, 1542 bp, Artificial Sequence
  source: /note="Description of Artificial Sequence: Synthetic polynucleotide"
atgctatcgaagaatttgtatagtaacaagcggttgctgacctcgacgaatacgctagtcagattcgcctccaccagatccacaggggtggaaaactccggagctggccctacctcttttaagaccatgaaagtcattgaccctcagcacagcgacaaacccaacgtgctgatactgggctcggggtggggagccatttcgtttttaaagcacattgacaccaagaagtacaacgttagcatcatctctcctagaaagtacttcttatttacccctttgctgcctagcgcaccagttggaacagtagacgagaagtccattattgagcccatcgtgaactttgccctcaagaaaaaggggaacgttacctactatgaggcagaagccaccagcatcaatcccgacaggaacaccgtgaccataaagtcactgagcgccgtgagccagctataccaacccgaaaaccatctaggcctgcatcaagcagaacctgctgaaattaagtacgactatttaatcagcgccgtaggtgcggaacctaacacctttggtattcctggggtcactgactacggtcacttcctgaaggaaattcccaacagcttggaaatacggagaacttttgccgccaatctagagaaggctaacctgttgccaaagggtgatcccgagagaagaagactactgtccattgtggtcgttggcggtgggcctactggtgtggaggccgctggcgaactacaggattatgttcaccaggacctgagaaagttcctccctgcactggccgaagaagtgcaaattcacttggtcgaagctctgcccatcgtgctgaacatgttcgagaaaaagcttagctcatacgcccaaagccatttagaaaacacttcgatcaaagtacatctgagaaccgccgtggccaaggttgaagaaaagcaattgttggcaaagaccaaacacgaagacggcaaaattaccgaagaaactatcccctacggtaccttgatttgggccacgggtaacaaggcaagacccgtaatcaccgacctgttcaagaagatccccgagcagaactcgtccaagcggggactggcagtgaatgactttttgcaggtcaaaggcagcaacaacattttcgccattggtgacaatgcatttagcggcctgcctccaacagcccaggtggcgcaccaagaagccgaatacttggccaagaatttcgataagatggctcagatcccaaatttccaaaagaatctatcttcaagaaaggataaaattgacctcttgttcgaggagaacaactttaaacctttcaaatacaacgatctgggtgccctggcatacctgggatccgaaagggccattgcaaccatcagatccggtaagagaacattttacaccggtggtggcttaatgaccttctacttatggcggatcttgtacttgagcatgattctaagcgcaagatcgagattaaaggtctttttcgactggatcaaattagcattcttcaaaagggactttttcaaaggcttatga

SEQ ID NO: 172 - DNA, 1542 bp, Artificial Sequence
  source: /note="Description of Artificial Sequence: Synthetic polynucleotide"
atgctgagcaagaacttgtatagtaacaagaggctgctcacctcgacgaacacgctagtcagattcgctagcaccagatccacaggcgtcgaaaacagcggagcaggtcctacatcttttaagaccatgaaagtcattgaccctcagcacagcgacaaaccaaacgtgctgatactgggttcggggtggggcgccatttcgtttctgaagcacattgacaccaagaagtacaacgtttccatcatctctcctagaagctatttcctgtttacgcccttgctgccttctgccccagtggggacagtagacgaaaagtccattatcgagcccatcgttaattttgctctcaagaaaaaggggaacgttacctactatgaggcagaagccaccagcatcaaccccgaccggaataccgttaccataaaatcactgtctgccgttagccagctgtaccaacctgaaaaccatctggggctgcatcaagcagaacctgctgaaattaagtacgactatttaatcagcgctgtaggtgccgaacctaacacatttggtattcccggcgtcactgattacggtcatttcttcaaggaaattcccaactctttggaaataagaagaacttttgccgccaatctagagaaggctaacttattgcctaagggtgatcccgaaagaagaagactgctgtccattgtcgtggttggtggagggcctactggtgtggaggccgctggtgagctacaggactatgttcaccaggacctgagaaagtttctgcctgcattggccgaggaagtccaaattcacctggtcgaagctctgcccatcgtgctgaacatgttcgagaaaaagctgtcatcatacgcccaaagccacttagaaaacacctcgatcaaagtgcatctgagaaccgctgtcgccaaggttgaagaaaagcaattgctggcaaagaccaaacacgaggacggtaaaataaccgaggaaactattccctacggcactctgatttgggccaccggtaacaaggccagacccgtaatcactgaccttttcaagaaaattcctgagcaaaacagctccaagagaggcttggccgtgaacgactttttgcaggtcaaaggcagcaacaacattttcgccattggtgacaacgcatttgccggcttgccaccaaccgcccaagtagcccaccaagaggccgaatacatcgccaagaattttgataagatggctcaaatacccaatttccagaagaatctatcctcaagaaaggataaaatcgacctcttgttcgaggaaaacaactttaagcccttcaagtacaacgacttaggcgccttagcatacctgggctccgaaagggccattgcaaccatcagatccggtaagcggaccttctacaccggtggtggcttaatgaccttctacctgtggcggattttgtacttgagcatgattctgagcgcaagatcgagactgaaggtgtttttcgactggatcaaattagcatttttcaaaagagacttcttcaaaggattatga

SEQ ID NO: 173 - DNA, 1542 bp, Artificial Sequence
  source: /note="Description of Artificial Sequence: Synthetic polynucleotide"
atgctatcgaagaatttgtacagtaacaagaggttgctcacctcgaccaatacgctagtcagattcgcttccaccagatccacaggcgtggaaaactccggagcaggtcctacctcttttaagaccatgaaggtcatcgaccctcagcacagcgacaaaccaaacgtgctgatactgggttcgggctggggagccatttcgtttttaaagcacattgacaccaagaagtacaacgttagcatcatctctcctagaaagtatttcttacacacgcctttgctgcctagcgccccagttgggacagtagacgaaaagtcaatcattgagcccatcgttaatttcgctctgaagaaaaaggggaacgttacctactatgaggcagaagccaccagcatcaatcccgaccggaataccgtgaccataaaatcattaagcgccgttagccagctataccaacctgaaaaccacctaggcctgcatcaagccgaacctgctgaaattaagtacgactacttaatcagcgctgtgggtgcggaacctaacacctttggtattcccggcgtgaccgattacggtcatttcctgaaggaaattcccaactctttggaaataagaagaacctttgccgccaatctagagaaggctaacctgttgccaaagggcgatcccgagagaagaagactactgagcatcgtcgtggttggtggtgggcctactggtgtggaagccgctggtgaactacaggattacgtgcaccaggacctgagaaagtttctgcctgccttggccgaggaagtgcaaattcacttggtcgaagctctgcccatcgttttgaatatgttcgagaaaaagctgagctcatacgcgcagagccacctggaaaacacttcgatcaaggtacatctgagaaccgctgtcgccaaagttgaagaaaagcaattgctggcaaagaccaagcacgaagacggcaaaataaccgaagaaaccatcccatacggtactttgatttgggccaccggtaacaaggccagacccgtaatcaccgacctgttcaagaagattcctgagcagaactcgtccaagagaggactggcagtgaacgactttctgcaggtgaaaggcagcaacaacattttcgccattggtgacaatgcatttgctggcctgccaccaaccgcccaagtggcgcaccaagaggccgaatacttggccaagaatttcgacaaaatggctcaaataccaaatttccaaaagaatctatcttcacggaaggataagatcgacctgctgttcgaggaaaacaactttaaacccttcaaatacaacgatctgggtgccttagcatacctgggatccgaaagggccattgcaaccatccgttccggtaagagaacattctacaccggcggtggcttaatgaccttctacttatggcggatcttgtacctgtccatgatcctaagcgccagatcgagattaaaggtgttcttcgactggatcaaattagccttcttcaaaagagacttcttcaaaggattatag

SEQ ID NO: 174 - DNA, 1542 bp, Artificial Sequence
  source: /note="Description of Artificial Sequence: Synthetic polynucleotide"
atgctatcgaagaacttgtatagtaacaagcggttgctcaccagcacgaatacgctagtccgcttcgcctccaccagatccaccggggtggaaaacagcggggctggtcctacatctttcaagaccatgaaagtcattgaccctcagcacagcgacaagccaaacgtgctgatactgggctcggggtggggagctatctcgtttctgaagcacattgacaccaagaagtacaacgtttccatcatcagccccagaagctatttcctgtttacgcctttgctgccctctgcaccagtggggaccgtagacgaaaagtcaatcatcgagcccatcgtgaattttgctctcaagaaaaaggggaacgttacctactatgaggcagaggccacctctatcaatcccgacaggaataccgtgaccataaaatcattatctgccgttagccagctgtaccagcctgaaaaccatctagggatgcatcaagcagagcctgctgagattaagtacgattatctgatcagtgccgtaggtgcggaacctaacacatttggtatccccggggtcactgactacggtcatttcctgaaggaaattcccaacagcttggaaatcagaagaaccttcgccgccaatctagagaaggctaacctgttgcctaagggcgaccccgaaagaagaagactactgtccattgtggtggttggcggagggcccacaggtgtagaggccgctggtgaactacaggattatgtgcaccaggacctgagaaagttcctccctgccctggccgaagaagtgcaaattcacttggtcgaagccctgcccatcgttttgaatatgtttgagaaaaagctttcatcatacgcgcagtcacatttagaaaacacttcgatcaaagtgcatctgagaacggctgtggccaaagttgaagaaaagcaactgttggcaaagaccaaacacgaagacggtaagattaccgaagaaaccattccatacggcactctgatttgggccacgggtaacaaggcaagaccggtaatcactgaccttttcaagaaaatccctgagcaaaacagcagcaagcggggattggccgtgaatgacttcttgcaggtgaaaggcagcaacaacatcttcgccattggcgacaatgcctttgctggcctgccaccaaccgcccaagtagcgcaccaggaagccgagtatttggccaagaactttgataaaatggcccaaatcccaaatttccaaaagaacctatcttcaagaaaggataaaattgatctcctgttcgaggagaacaacttcaagcctttcaagtacaacgatctgggtgccctggcctacctgggatccgaaagggccattgccaccatccgtagcggtaagagaaccttttacaccggtggaggcctgatgaccttctacttatggagaattctgtacttgtccatgattctatctgccagaagcagactgaaggtctttttcgactggattaaattagcctttttcaaaagagactttttcgagggattatag

SEQ ID NO: 175 - DNA, 1542 bp, Artificial Sequence
  source: /note="Description of Artificial Sequence: Synthetic polynucleotide"
atgctatcgaagaatctgtacagtaacaagaggttgctcacctcgacgaatacgctcgtccgcttcgcctccaccagatccacaggcgtggaaaacagcggagcaggtcccacatcttttaagaccatgaaagtcattgacccccagcacagcgacaagccaaacgtgctgatactgggttcggggtggggagccattagctttttaaagcacattgacaccaagaagtacaacgttagcatcatctctcccagaagctatttcttatttacccctctgttacctagcgcaccagtggggacagtggacgagaagtcaattattgagcccatcgttaatttcgccctcaagaaaaaggggaacgtcacctactacgaggcagaagccacctctatcaaccccgacaggaataccgtgaccataaaaaacttatctgccgttagccagctataccaacctgagaaccatctggggctgcatcaggcagagcccgctgaaattaagtacgattatttaatcagcgctgtaggtgcggagcctaacacatttggtattcctggggtgactgattacggtcatttcctggaggaaattcccaactctttggaaataagaagaacttttgccgccaacctggagaaggctaacttattgcctaagggcgatcccgaacggagaagactgctgagcattgtggtcgttggtggagggcctactggtgtagaagctgctggcgaactgcaggattacgttcaccaggacctgcggaagtttctccccgcattggccgaagaagtccagattcacctggtcgaagccctgcccatcgtgctgaacatgtttgagaaaaagcttagctcatacgcgcagagccacttagaaaacacttcgatcaaagtacatctgagaacggctgtcgccaaggtggaagagaagcaactgctggccaagaccaaacacgaagacggcaaaataaccgaagaaactattccctacggcactttgatttgggccaccggtaacaaggcaagaccggtaatcactgaccttttcaagaaaattcctgagcaaaacagctccaagcggggattggcagtgaatgactttttgcaggtcaaaggcagcaacaacattttcgccatcggtgacaacgcctttgctgggttgcctccaaccgcccaagtagcgcaccaggaggccgagtatttggccaagaattttgataaaatggctcagatacccaatttccagaagaatctatcctcaagaaaggataagattgatctcttgttcgaggaaaacaactttaaacctttcaaatacaacgatctgggcgccttagcatacctgggatccgaaagggccattgccaccatccgttccggtaagagaacattttacaccggcggtggcttaatgaccttctacttatggagaattttgtacttgtccatgatcctatctgcacgcagcagactgaaggtctttttcgactggattaagttagcattcttcaagagggacttttttaaaggactgtag

SEQ ID NO: 176 - DNA, 1542 bp, Artificial Sequence
  source: /note="Description of Artificial Sequence: Synthetic polynucleotide"
atgctgagcaagaacttgtatagtaacaagaggttgctgacctcgaccaatacgctagtgagattcgcttccaccagatccacaggggtggaaaactccggggctggtcctacatctttcaagaccatgaaagtcattgaccctcagcacagcgacaaacccaacgtgctgatactgggttcgggctggggcgccatttcgtttttaaagcacattgacaccaagaagtacaacgtttccatcatctctcctagaaagtacttcctgttcacgcctttgttacctagcgcaccagtggggacagtggacgagaagtcaattattgagcccatcgttaactttgccctcaagaaaaaggggaacgttacctactacgaggcagaggccacctctatcaatcccgacaggaataccgttaccatcaaaagcttatctgccgtttcccagctataccagcctgaaaaccatctagggctgcatcaagcagaacctgctgaaattaagtacgactatttaatcagtgctgtgggtgcggagcccaacacctttggtattcctggggtgactgattacggccacttcctgaaagaaattcccaacagcttggaaataagaagaacttttgccgccaatctagaaaaggctaacttattgcctaagggtgaccccgaaagaagaaggctgctgtccatcgtcgtggttggtggtgggcctacaggtgtggaagccgctggtgagctgcaggactatgtgcaccaggacctgagaaagttcttccccgcactggccgaagaagtccaaattcacttggtcgaagctctgcccatcgttttgaatatgtttgagaagaagctgagctcatacgcgcaatcacacttagaaaacacctcgatcaaagtacatctgagaacggccgtggccaaagtggaagaaaagcaactgttggcaaagaccaaacacgaggacggtaagattaccgaagaaactattccctacggtactctgatttgggccacgggtaacaaggccagacccgtaatcactgaccttttcaagaaaatccccgagcaaaacagctccaagagaggactggccgtgaatgacttcttgcaggtgaaaggcagcaacaacattttcgccatcggcgacaacgcatttgccgggctgccaccaaccgcccaggtggcgcaccaggaggccgagtatttggccaagaattttgataaaatggcccaaataccaaatttccaaaagaacctatcttcaagaaaggataaaattgatctcttgttcgaggaaaacaactttaaacctttcaaatacaacgatctgggtgccttagcctacctgggatccgaaagagccattgccaccatccgttccggtaagcggacattttacaccggtggtggcttaatgaccttctacctgtggagaattttgtacttgtccatgattctaagcgcaagatcgagattaaaggtctttttcgactggatcaaattagcatttttcaaaagagacttttttaagggattatga

SEQ ID NO: 177 - DNA, 1542 bp, Artificial Sequence
  source: /note="Description of Artificial Sequence: Synthetic polynucleotide"
atgctatcgaagaacttgtatagtaacaagaggttgctcacctcgaccaatacgctagtcagattcgcctccaccagatccacaggggtggaaaacagcggagcaggtcctacaagctttaagaccatgaaagtcattgaccctcagcacagcgacaaaccaaacgtgctgatactgggttcggggtggggagctatctcgtttctgaagcacattgacaccaagaagtacaacgtctccatcatctctcccagaagctatttcctgcacacgcccttgttaccttctgcacctgtggggacagtggacgaaaagtcaatcatcgagcccatcgtgaactttgctctcaagaaaaaggggaacgttacctactacgaggccgaagccacctctatcaatcccgaccggaataccgttaccataaaatcactgagcgccgtgtcccagctataccagcccgaaaaccatctagggctgcatcaagcagaacctgctgaaattaagtacgattatttaatcagtgctgtgggcgccgaacccaacacatttggaattcctggggtgactgattacggccatttcctgaaagaaattcccaacagcttggaaataagacggaccttcgccgccaacctagaaaaggctaacttattgccaaagggtgatcccgagagaagaaggctgctgagcatcgtggtggtgggtggtgggcctactggcgtggaggctgctggtgaactgcaggattatgttcaccaggacctgagaaagttcctgcctgcactggccgaagaagtccaaattcacttggtcgaagctctgcccatcgtgttgaatatgtttgagaaaaagctgtcatcatacgcgcagtcacacttagaaaacacttcgatcaaggtacacctgagaacggctgtcgccaaggttgaagagaagcaattgttggcaaagaccaaacacgaagacggcaaaataaccgaagaaactattccatacggcaccttgatttgggccaccggcaacaaggccagaccggtgatcactgaccttttcaagaaaattcctgagcaaaacagcagcaagcggggactggccgtgaacgactttttgcaggtgaaaggcagcaacaacattttcgccatcggtgacaatgcatttagcggcttgccaccaaccgcccaggtggcgcaccaagaggccgaatacctggccaagaatttcgataaaatggctcaaataccaaatttccaaaagaacctatcctcaagaaaggataaaattgatctgttgttcgaggagaacaactttaaacctttcaaatacaacgatttaggcgccttagcatacctgggatccgaaagagccattgcaaccatacgttccggtaagagaacattctacaccggtggtggcttaatgaccttctacctgtggagaattttgtacttgtccatgatcctatctgcccgcagcagattaaaggtgtttttcgactggatcaaattagcatttttcaaaagagacttctttaaaggactgtga

SEQ ID NO: 178 - DNA, 1542 bp, Artificial Sequence
  source: /note="Description of Artificial Sequence: Synthetic polynucleotide"
atgctgtcgaagaatctgtatagtaacaagaggttgctcacctcgacgaatacgctcgtcagattcgcctccaccagatccacaggcgtggaaaactccggagctggtcccacatcttttaagaccatgaaagtcattgaccctcagcacagcgacaaaccaaacgtgctgatactgggttcgggctggggagctatttcgtttctgaagcacattgacaccaagaagtacaacgtctccatcatctctcctagaagctatttcttatttacgcctctgctgccttctgcaccagttgggacagtggacgaaaagtcaattattgagcccatcgtgaattttgccctcaagaaaaaggggaacgttacctactatgaggcagaagccacctctatcaaccccgacaggaataccgttaccatcaaatcactgagcgccgttagccagctataccaacccgaaaaccatctgggcctgcaccaagcagaacctgctgaaattaagtacgattatttaatcagtgctgtgggcgcggaacccaacacctttggtattcctggggtcactgactacggtcatttcctggaggaaattcccaacagcttggaaatcagaagaacctttgccgccaacctagaaaaggccaacttattgcctaagggtgatcccgagagaagaagactgctgtccatcgtcgtggttggtggaggccctactggtgtggaagctgctggtgaactgcaggattatgttcaccaggacctgcggaagtttctccctgcattggccgaggaagtgcaaattcacttggtcgaagctctgcccatcgttttgaatatgtttgagaaaaagctgtcatcatacgcgcaatcacacctggaaaacacctcgatcaaagtgcatctgagaacggctgtggccaaggttgaagaaaagcagttgttggcaaagaccaaacacgaagacggcaaaataaccgaggaaaccatcccatacggtactctgatttgggccaccggcaacaaggcaagaccggtaatcactgaccttttcaagaaaattcctgagcagaacagctccaagagaggcctggccgtgaatgacttcttgcaggtgaaaggcagcaacaacattttcgccattggtgacaatgcatttgctgggttgccaccaaccgcccaagtggcgcaccaagaagccgaatacatcgccaagaactttgataagatggcccaaatcccaaatttccagaagaacctgtcttcaagaaaggataaaattgacctcctgttcgaggagaacaactttaagcctttcaaatacaacgatttaggtgccttagcctacctgggctccgaaagggccattgcaaccatccgtagcggtaagcggaccttctacaccggcggtggcttaatgaccttctacttatggagaattttgtacctgtccatgattctgagcgccagaagcagattaaaggtcttcttcgactggatcaaactggcctttttcaagagagacttctttaaaggattatag

SEQ ID NO: 179 - DNA, 1542 bp, Artificial Sequence
  source: /note="Description of Artificial Sequence: Synthetic polynucleotide"
atgctgtcgaagaatttgtatagtaacaagaggttgctcaccagcacgaataccctcgtcagattcgccagcaccagatccacaggggtggaaaacagcggggctggccctacatctttcaagaccatgaaagtcattgaccctcagcacagcgacaaaccaaacgtgctgatactgggttcggggtggggcgccatttcgtttttaaagcacattgacaccaagaagtacaacgtttccatcatcagccctagaagctacttcctgtttacgcccttgttaccctctgccccagttgggacagtagacgaaaagtccatcatcgagcccatcgttaactttgctctcaagaaaaaggggaacgttacctactatgaggcagaagccacctctatcaatcccgaccggaataccgttaccataaaatcactgagcgccgtgtcccagctgtaccaacctgaaaaccatctgggcatgcatcaagcagaacctgctgaaattaagtacgactatttaatcagtgctgtaggtgcggagcccaacacatttggtatccccggcgtcactgactacggccatttcctgaaggagattcccaactctttggaaataagaagaacttttgccgccaacctagagaaggctaacttactgccaaagggtgatcccgaaagaagaagactactgtccatcgtcgtcgttggtggagggcctacaggtgtggaggccgctggtgaactacaggactatgtgcaccaggacctgagaaagttcctccccgcattggccgaagaagtccagattcacttggtcgaagctctgcccatcgttttgaacatgtttgagaaaaagctgtcatcatacgcccagtcacatttagaaaacacctcgatcaaagtgcatctgagaacggccgtcgccaaagttgaagaaaagcagctgttggcaaagaccaaacacgaagacggcaaaattaccgaagaaactatcccatacggtactctgatttgggccacgggtaacaaggcaagaccggtaatcactgacctgttcaagaaaattcccgagcaaaactcgagcaagagaggattggcagtgaacgactttttgcaggtgaaaggcagcaacaacatcttcgccattggtgacaatgcatttgccgggttgcctccaacagcccaagtagcgcaccaggaggccgaatacttggccaagaactttgacaaaatggctcagatccccaatttccaaaagaatctatcttccagaaaggataagatcgatctgttgttcgaggaaaacaactttaagcctttcaaatacaacgatctgggtgccttagcatacctgggatccgaaagggccattgccaccataagatccggtaagagaaccttttacaccggtggtggcctgatgaccttctacttatggcggatcttgtacttgtccatgatcctatctgcaagatcgagactgaaggtgtttttcgactggattaaattagcctttttcaagagagacttctttgagggcttatag

SEQ ID NO: 180 - DNA, 1542 bp, Artificial Sequence
  source: /note="Description of Artificial Sequence: Synthetic polynucleotide"
atgctatcgaagaatttgtacagtaacaagaggctgctcaccagcacgaacaccctagtcagattcgcttccaccagatccacaggggtggaaaactccggagctggtcccacaagctttaagaccatgaaagtcattgaccctcagcacagcgacaaaccaaacgtgctgatactgggttcggggtggggagctatttcgtttttaaagcacattgacaccaagaagtacaacgtctccatcatcagccccagaaagtacttcttatttacgcccttgttacctagcgcaccagtgggaacagtagacgaaaagtccatcatcgagcccatcgtgaattttgctctgaagaaaaaggggaacgttacctactatgaggccgaggccacctctatcaatcccgaccggaacaccgtgaccataaaatcattatctgccgttagccagctataccaacctgaaaaccatctagggctgcatcaagccgagcctgctgaaattaagtacgactatttaatcagtgctgtgggcgcggagcccaacacatttggtattcccggggtcactgattacggtcatttcctgaaagaaattcccaactctttggaaataagaagaactttcgccgccaatctagagaaggccaacttattgccaaagggcgaccccgagcggagaaggctactgtccattgtggtggtgggtggtggccctacaggtgtagaggccgctggtgaactacaggattatgttcaccaggacctgagaaagtttctccctgcattggccgaagaagtgcaaattcacctggtggaagccctgcccatcgttctgaatatgttcgagaaaaagcttagcagctacgcgcaatcacacctggaaaacacctccatcaaggtacatctgagaacggccgtcgccaaagttgaagaaaagcagctgctggccaagaccaagcacgaagacggtaagataaccgaagaaactattccatacggtaccttgatttgggccacgggtaacaaggcaagaccggtgatcactgaccttttcaagaaaattcccgagcagaactcgtccaagagaggcctggcagtgaatgactttttgcaggtcaaaggcagcaacaacatcttcgccattggtgacaacgcctttagcgggttgcctccaaccgcccaagtagcgcaccaggaggccgagtatctggccaagaatttcgataaaatggcccaaatacccaatttccaaaagaacctgtcttcaagaaaggataaaattgatctgctgttcgaggagaacaactttaaacctttcaaatacaacgatttaggcgccctggcatacctgggatccgaaagggccattgcaaccataagatccggtaagcggacattttacaccggtggtggcttaatgaccttctacctgtggagaattttgtacctgtccatgattctatctgcacgctcgagactgaaggtgtttttcgactggatcaaattagcattcttcaagagagacttttttaaaggattatga

SEQ ID NO: 181 - DNA, 1542 bp, Artificial Sequence
  source: /note="Description of Artificial Sequence: Synthetic polynucleotide"
atgctgtcgaagaatctgtatagcaacaagaggttgctgacctcgacgaatacgctagtccgcttcgcttccaccagatccaccggggtggaaaactccggagctggtcctacatcttttaagaccatgaaggtcattgacccccagcacagcgacaaaccaaacgtgctgatactgggttcggggtggggagctatcagctttttaaagcacattgacaccaagaagtacaacgttagcatcatctctcctagaagctatttcttatttacgcccttgttaccctctgcaccagttgggacagtggacgaaaagtcaatcatcgagcccatcgttaacttcgctctcaagaaaaaggggaacgttacctactacgaggccgaggccaccagcatcaatcccgacaggaacaccgttaccataaaaaacttatctgccgttagccagctgtaccaacccgagaaccatctagggctgcatcaggcagaacctgctgagattaagtacgattacttaatcagtgccgtaggcgcggaacccaacacatttggtattcctggggtgactgattacggtcatttcttcaaggagatccccaactctttggaaatacggagaaccttcgccgccaatctagaaaaggctaacttactgccaaagggtgaccccgagagaagaagactactgtccatcgtcgtggttggcggaggccccacaggcgtggaggccgctggtgagctacaggactatgtgcaccaggacctgagaaagttcctgcctgccctggccgaagaagtccaaattcacctggtcgaagctctgcccatcgtgctgaatatgtttgagaaaaagcttagctcatacgcgcaaagccatctggaaaacacctcgatcaaggtgcacctgagaacggctgtcgccaaagttgaagaaaagcagttgttggccaagaccaaacacgaggacggtaaaataaccgaagaaactattccctacggtactttgatttgggccacgggcaacaaggcaagaccggtgatcactgaccttttcaagaagatccctgagcaaaactcgtccaagagaggcttggccgtgaacgactttttgcaggtgaaaggcagcaacaacattttcgccatcggtgacaacgcctttgccggcttgccacctaccgcccaggtagcgcaccaggaggccgaatatttggccaagaattttgataagatggctcaaatacccaatttccaaaagaatctatcttcccggaaggataaaattgatctcttgttcgaggagaacaactttaaacctttcaaatacaacgatttaggtgccctggcatacctgggatccgaaagggccattgcaaccatacgtagcggtaagagaaccttttacaccggtggtggcctgatgaccttctacttatggcggatcttgtacttgtccatgattctatctgccagatcgagactgaaggtctttttcgactggattaaattagcattcttcaaaagagacttttttaaaggattatag

SEQ ID NO: 182 - DNA, 1542 bp, Artificial Sequence
  source: /note="Description of Artificial Sequence: Synthetic polynucleotide"
atgctaagcaagaatttgtacagtaacaagcggttgctcacctcgacgaacacgctagtcagattcgcttccaccagatccaccggggtggaaaactccggagcaggccctacaagctttaagaccatgaaagtcattgaccctcagcacagcgacaaacccaacgtgctgatactgggctctgggtggggagctatttcgtttttaaagcacattgacaccaagaagtacaacgttagcatcatctctcctagaagctatttcctgtttacgcccctgttaccctctgcaccagttggaacagtggacgagaagtccattatcgagcccatcgtgaattttgctctgaagaaaaaggggaacgttacctactacgaggcagaggccacctctatcaatcccgacaggaataccgttaccatcaagtcattaagcgccgtttcccagctataccaacctgagaaccatctgggcctgcatcaggcagagcctgccgaaattaagtacgactatttaatcagtgctgtaggcgccgaacctaacacatttggtatccccggcgtcactgattacggtcatttcttcaaagagattcccaacagcttggaaataagacggacttttgccgccaacctagaaaaggccaacctgctgcctaagggtgaccccgaaagaagaagactactgtccattgtcgtggttggtggtgggcctactggtgtagaggccgctggtgaactacaggattatgttcaccaggacctgagaaagtttctccccgcattggccgaagaagtccagattcacttggtggaagccctgcccatcgtgctgaatatgtttgagaaaaagcttagcagctacgcgcaatcacatttagaaaacacttcgatcaaagtacatctgagaaccgctgtcgccaaagttgaagaaaagcaattgttggcaaagaccaagcacgaagacggcaaaataaccgaagaaactattccatacggtactctgatttgggccaccggcaacaaggcaagaccggtgatcactgaccttttcaagaaaatccccgagcagaacagctccaagcggggcctggccgtgaatgactttttgcaggtgaaaggcagcaacaacatcttcgccatcggtgacaatgcatttagcgggctgccaccaacagcccaagtagcgcaccaagaggccgaatacttggccaagaactttgataagatggctcaaatcccaaatttccaaaagaatctgtcctccagaaaggataagattgatctcttgttcgaggaaaacaactttaagcctttcaaatacaacgacttaggtgccttagcatacctgggatccgaaagggccattgcaaccataagatccggcaagagaaccttttacaccggcggaggcttaatgaccttctacttatggagaattttgtacttgtccatgatcctgtctgcaagatcgagactgaaggtctttttcgactggattaaattagcattcttcaaaagagacttttttaagggattatag

SEQ ID NO: 183 - DNA, 1542 bp, Artificial Sequence
  source: /note="Description of Artificial Sequence: Synthetic polynucleotide"
atgctgtcgaagaacctgtacagtaacaagaggttgctcaccagcacgaacacgctcgtcagattcgcttccaccagatccacaggcgtggaaaactccggagcaggtcccacatcttttaagaccatgaaagtcatcgaccctcagcacagcgacaaaccaaacgtgctgatactgggttctgggtggggagctatcagctttctgaagcacattgacaccaagaagtacaacgtttccatcatctctcctagaagctacttcctgtttacgcctctgctgccttctgccccagtgggaaccgtagacgaaaagtcaattattgagcccatcgtgaatttcgctctgaagaaaaaggggaacgttacctactacgaggcagaggccaccagcatcaatcccgacaggaataccgtgaccataaaaaacttaagcgccgttagccagctataccagcccgaaaaccacctagggctgcaccaagcagagcctgctgaaattaagtacgattatttaatcagtgccgtaggtgcggaacctaacacatttggaattcctggggtcaccgactacggtcacttcctgaaagaaattcccaactctttggaaataagaagaacctttgccgccaatctagagaaggccaacttattgccaaagggtgatcccgaaagaagaaggctactgtccatcgtggtcgtgggcggtggccctactggtgtggaagccgctggtgagctacaggattacgttcaccaggacctgcggaagtttctccccgcactggccgaggaagtgcaaattcacttggtggaagccctgcccatcgttctgaacatgttcgagaagaagctttcatcatacgcgcaaagccatctggaaaacacctccatcaaagtacatctgagaacggctgtcgccaaagttgaagaaaagcaattgttggcaaagaccaagcacgaagacggtaaaataaccgaggaaactattccatacggtactttgatttgggccacgggtaacaaggccagaccggtaatcactgaccttttcaagaaaattcccgagcaaaactcgtccaagcggggcttggccgtgaatgactttttgcaggtgaaaggcagcaacaacattttcgccattggcgacaatgcctttagcgggctgccaccaacagcccaagtagcccaccaagaagccgaatatttggccaagaactttgataaaatggcccagataccaaatttccaaaagaacctatcttcacggaaggataagattgatctcttgttcgaggagaacaactttaaacctttcaaatacaacgatttaggcgccttagcatacctgggctccgaaagggccattgcaaccatccgttccggtaagcggacattttacaccggtggtggcctgatgaccttctacttatggagaattttgtacttgtccatgattctgtctgcaagaagcagattaaaggtctttttcgactggattaagctggcattcttcaagagagactttttcaaaggattatag

SEQ ID NO: 184 - DNA, 1542 bp, Artificial Sequence
  source: /note="Description of Artificial Sequence: Synthetic polynucleotide"
atgctgtcgaagaacttgtacagtaacaagcggttgctcacctcgacgaatacgctagtcagattcgcctccaccagatccacaggggtggaaaactccggggcaggccctacatctttcaagaccatgaaagtcatcgacccccagcacagcgacaaaccaaacgtgctgatactgggttcggggtggggcgctatctcgtttctgaagcacattgacaccaagaagtacaacgttagcatcatctctcctagaaagtatttcttatttacgcctttgttaccctctgcaccagtggggacagtggacgaaaagtcaattattgagcccatcgttaattttgccctgaagaaaaaggggaacgttacctactatgaggccgaagccacctctatcaaccccgaccggaataccgttaccataaaaagcttatctgccgttagccagctataccaacctgaaaaccatctagggctgcatcaggcagaacctgctgaaattaagtacgattatttaatcagtgctgtaggtgccgaacctaacacatttggtatccccggcgtgactgattacggccatttcctgaaggaaatccccaactctctggaaataagaagaacttttgccgccaatctagaggaggctaacctgctgccaaagggcgatcccgaaagaagaagactgctgtccattgtcgtcgtgggtggtgggcctacaggtgtggaagccgctggcgagctacaggattatgttcaccaggacctgagaaagtttctccctgcactggccgaagaagtccaaattcacctggtcgaagctctgcccatcgttctgaatatgtttgagaagaagcttagctcatacgcgcagtcacatttagaaaacacttcgatcaaagtacatctgagaacggctgtggccaaagttgaagaaaagcaattgttggcaaagaccaagcacgaggacggtaagataaccgaggaaaccattccctacggtactctgatttgggccaccggtaacaaggccagaccggtaatcaccgaccttttcaagaagatccctgagcagaactcgtccaagagaggattggcagtgaatgacttcttgcaggtcaaaggcagcaacaacatcttcgccattggtgacaatgcatttgccgggctgccaccaaccgcccaagtagcccaccaagaggccgagtatttggccaagaacttcgataagatggcccaaatacccaatttccaaaagaatctatcttcaagaaaggataaaatcgatctcttgttcgaggagaacaactttaagcctttcaagtacaacgatctgggtgccctggcctacctgggatccgaaagagccattgccaccataagaagcggtaagcggaccttttacaccggcggtggcctgatgaccttctacctgtggagaattctgtacttgtccatgattctaagcgcccgctcgagactgaaggtctttttcgactggattaagttagcctttttcaaaagggacttctttaaaggcttatag

SEQ ID NO: 185 - DNA, 1542 bp, Artificial Sequence
  source: /note="Description of Artificial Sequence: Synthetic polynucleotide"
atgctgagcaagaacctgtatagcaaccggaggctgctgaccagcacgaatacgctagtccgcttcgccagcaccagatccaccggcgtggaaaactccggggctggccctacaagcttcaagaccatgaaagtcattgaccctcagcacagcgacaagcccaacgtgctgatactgggctcggggtggggcgctatcagctttttaaagcacatcgacaccaagaagtacaacgtcagcatcatcagccctagaaagtatttcctgtttacccctctgctgccctctgcacctgtgggaaccgtggacgaaaagtcaatcattgagcccatcgttaatttcgctctcaagaaaaagggcaacgtcacctactacgaggcagaagccaccagcatcaatcccgaccggaacaccgtgaccatcaaaagcctgtctgccgttagccagctgtaccagcccgagaaccacctgggcctgcatcaggccgaacccgccgagattaagtacgactacctgatcagcgccgtgggcgccgaacccaacacctttggaatccctggggtgaccgattacggccatttcctgaaagagattcccaacagcctggaaatcagacggaccttcgccgccaacctggaaaaggctaacctgttgccaaagggtgaccccgaacggagaaggctgctgtccattgtggtcgtgggcggaggccctactggtgtggaggccgctggtgagctgcaggactacgttcaccaggacctgagaaagtttctgcccgcattggccgaggaagtgcaaattcacctggtggaagctctgcccatcgtgctgaatatgtttgagaaaaagctttcaagctacgcgcaaagccatctggaaaacacctccatcaaagtacacctgagaaccgctgtggccaaagttgaagagaagcagctgctggccaagaccaagcacgaggacggtaagataaccgaagaaactatcccctacggcaccctgatttgggccaccggcaacaaggccagacccgtaatcaccgaccttttcaagaagatccctgagcaaaacagcagcaagcggggactggcagtgaacgactttttgcaggtcaaaggcagcaacaacatcttcgccatcggcgacaacgcctttgccggcctgcctcctacagcccaagtggcccaccaagaagccgagtacctggccaagaattttgacaagatggctcaaatacccaatttccagaagaacctatcctccagaaaggataaaattgatctcttgttcgaggaaaacaactttaaacctttcaaatacaacgatctgggtgccctggcatacctgggcagcgaaagagccattgcaaccatccgttccggcaagcggaccttctacaccggtggaggcctgatgaccttctacctgtggcggatcctgtacttgtccatgatcctaagcgcacgcagcagattaaaggtctttttcgactggatcaagctggccttcttcaaaagagacttttttaagggcctgtga

SEQ ID NO: 186 - DNA, 1542 bp, Artificial Sequence
  source: /note="Description of Artificial Sequence: Synthetic polynucleotide"
atgctatcgaagaatttgtatagtaacaagcggttgctgacctcgacgaacaccatggtgcgcttcgccagcaccagatccaccggggtcgaaaactccggagctggtcctacctctttcaagaccatgaaggtcatcgacccccagcacagcgacaagcccaacgtgctgatactgggctctggctggggcgccatctcgtttctgaagcacatcgacaccaagaagtacaacgtcagcatcatcagccccagaagctacttcttattcacgcccctgctgcctagcgcacctgttggaaccgtggacgagaagtccatcatcgagcccatcgttaatttcgccctgaagaaaaagggcaacgttacctactacgaggccgaggccaccagcatcaaccccgaccggaataccgtgaccatcaagagcctgagcgccgtttcccagctataccagcctgaaaaccacctggggctgcaccaagccgaacccgctgaaattaagtacgactacctgatcagtgctgtaggcgcggagcccaacacctttggtattcctggcgtcactgattacggccacttcctgaaagagattcccaactctttggaaatacggcggacttttgccgccaatctggagaaggccaacctgttgccaaagggtgaccccgagagaagaagactgctgtccatcgtggtcgttggcggtgggcctactggtgtagaagctgctggtgagctacaggactacgtgcaccaggacctgcggaagttcctccccgccctggccgaggaagtgcagattcacctggtggaagccctgcccatcgtgctgaatatgttcgagaagaagctgagcagctacgcccaaagccacttagaaaacacctccatcaaggtacatctgagaaccgccgtggccaaggtggaagagaagcagctgctggccaagaccaagcacgaggacggcaagattaccgaagaaactatcccatacggtaccctgatttgggccaccggtaacaaggccagacccgtaatcactgacctgttcaagaagatccctgagcagaactcgtccaagagaggcttggcagtgaacgactttctgcaggtcaaaggcagcaacaacattttcgccatcggcgacaacgcatttgccgggctgcctccaaccgcccaagtggcccaccaggaagccgagtacatcgccaagaactttgacaagatggctcagatcccaaatttccaaaagaatctgtcctcacggaaggataaaatcgatctgttgttcgaggaaaacaactttaaacccttcaaatacaacgacctgggtgccctggcctacctgggcagcgaaagagccattgccaccatccgttccggcaagagaacattctacaccggcggaggcttaatgaccttctacctgtggagaatcttgtacctgtccatgatcctatctgcaagatcgagattaaaggtctttttcgactggattaagttagccttcttcaaaagagactttttcaagggcctgtga

SEQ ID NO: 187 - DNA, 1542 bp, Artificial Sequence
  source: /note="Description of Artificial Sequence: Synthetic polynucleotide"
atgctgagcaagaacctgtacagcaacaagcggctgctgaccagcacgaacacgctcgtgcgcttcgcttccaccagatccacaggggtggaaaacagcggggcaggtcccacaagcttcaagaccatgaaagtcattgacccccagcacagcgacaagcccaacgtgctgatcctgggttctgggtggggagccatttcgtttctgaagcacatcgacaccaagaagtacaacgttagcatcatcagccccagaagctatttcctgttcacccccttgctgccttctgccccagtgggaacagtagacgagaagtcaattatcgagcccatcgtgaactttgccctgaagaaaaaggggaacgtcacctactacgaggccgaggccaccagcatcaaccccgacaggaataccgtgaccataaagagcctgagcgccgtttcccagctgtaccaacccgagaaccacctgggcctgcatcaagcagagcccgctgagattaagtacgattacttaatcagtgctgtgggtgcggaacctaacacctttggtattcccggggtgaccgactacggccacttcctggaggaaattcccaactctttggaaatacggagaactttcgccgccaatctagaaaaggccaacttactgcctaagggtgatcccgaacggagaaggctgctgagcatcgtggtggtgggtggaggccccactggtgtggaggctgctggcgagctgcaggattacgtgcaccaggacctgcggaagttcctccccgccctggccgaggaagtgcagattcacctggtggaagccctgcccatcgttttgaacatgttcgagaagaagcttagctcatacgcgcagtcacacctggaaaacacctccatcaaggtgcacctgagaaccgctgtcgccaaggtggaagaaaagcagttgttggccaagaccaagcacgaagacggcaaaataaccgaagaaactatcccctacggcaccctgatttgggccaccggcaacaaggccagaccggtgatcaccgacctgttcaagaagatccccgagcaaaacagctccaagcggggactggccgtgaacgacttcctgcaggtcgagggcagcaacaacatcttcgccatcggcgacaatgcatttgccggcctgcctcctaccgcccaagtagcgcaccaggaggccgagtacttggccaagaattttgataagatggcccaaatccccaatttccagaagaacctatcttcaagaaaggataagattgatctcttgttcgaggaaaacaacttcaaacctttcaagtacaacgacttaggtgccctggcctacctgggaagcgaaagggccattgccaccataagaagcggtaagagaacattttacaccggcggtggcttaatgaccttctacctgtggcggatcctgtacctgagcatgatcctgagcgccagaagcagactgaaggtgttcttcgactggatcaagttagcatttttcaaaagagacttcttcaagggactgtga

SEQ ID NO: 188 - DNA, 1542 bp, Artificial Sequence
  source: /note="Description of Artificial Sequence: Synthetic polynucleotide"
atgctgagcaagaacttgtacagcaacaagaggctgctcaccagcacgaacaccctagtgcgcttcgctagcaccagatccaccggcgtggaaaacagcggagcaggccccacaagcttcaagaccatgaaagtcatcgacccccagcacagcgacaaaccaaacgtgctgatactgggctctgggtggggagctatttcgtttctgaagcacatcgacaccaagaagtacaacgtcagcatcatcagccctagaagctacttcttattcacgcccctgttaccctctgccccagttgggaccgtggacgagaagtcaattatcgagcccatcgtgaatttcgctctgaagaaaaagggcaacgtcacctactacgaggccgaagccacctctatcaatcccgaccggaacaccgttaccataaagagcttaagcgccgttagccagctataccagcccgaaaaccacctagggctgcaccaagccgagcccgccgaaattaagtacgactatttaatcagcgctgtaggcgcggagcctaacacctttggaattcctggcgtgactgattacggccacttcctgaaagagattcccaactctttggaaatccggcggaccttcgccgccaatctggaggaggctaacttactgccaaagggcgaccccgaacggagaaggctactgtccatcgtggtcgtgggcggagggcctactggcgtggaagctgctggcgagctgcaggactacgttcaccaggacctgcggaagtttctgcctgccttggccgaagaagtgcagattcacctggtggaagccctgcccatcgtgttgaacatgttcgagaagaagctgagctcatacgcccagagccacttagaaaacacttccatcaaggtgcacctgagaaccgccgtggccaaggttgaagaaaagcagttgttggcaaagaccaagcacgaagacggcaaaattaccgaagaaactatcccctacggcaccttgatttgggccaccggtaacaaggccagaccggtgatcaccgaccttttcaagaagatccctgagcaaaacagcagcaagcggggactggcagtgaatgactttctgcaggtcaaaggcagcaacaacatcttcgccattggcgacaacgcctttgccgggctgccacctacagcccaggtggcccaccaggaagccgaatacctggccaagaactttgataagatggcccagatacccaatttccaaaagaacctatcttcaagaaaggataaaattgacctgctgttcgaggagaacaacttcaaacccttcaagtacaacgacctgggtgccctggcctacctgggatccgaaagggccattgccaccataagaagcggcaagcggaccttctacaccggcggaggcctgatgaccttctacttatggcggatcttgtacttgtccatgatcctaagcgccagaagcagactgaaggtgttcttcgactggattaagatggcattcttcaaaagggacttcttcaagggcttatga

SEQ ID NO: 189 - DNA, 1542 bp, Artificial Sequence
  source: /note="Description of Artificial Sequence: Synthetic polynucleotide"
atgctgagcaagaatctgtatagcaacaagcggctgctgaccagcaccaatacgctcgtccgcttcgcctccaccagatccaccggggtggaaaacagcggggctggccctacatctttcaagaccatgaaagtcattgaccctcagcacagcgacaaacccaacgtgctgatcctgggctctggctggggcgccatcagctttttaaagcacatcgacaccaagaagtacaacgtttccatcatctctcccagaagctatttcctgttcacgcctctgttaccttctgcaccagtggggaccgtagacgaaaagtccatcattgagcccatcgtgaatttcgccctgaagaaaaagggcaacgttacctactacgaggccgaggccacctctatcaaccccgaccggaataccgtgaccatcaagaacttaagcgccgtgagccagctgtaccaacccgagaaccacctagggctgcaccaggcagaacccgccgagattaagtacgattatctgatcagtgccgtgggcgccgagcctaacacctttggtattcctggcgtgactgactacggtcacttcctgaaggagatccccaactctctggaaatccggagaaccttcgccgccaacctggaaaaggccaacctgctgccaaagggcgaccccgagcggagaaggctgctgagcatcgtggtcgtgggtggtggccccactggtgtagaggctgctggcgaactgcaggattatgtgcaccaggacctgcggaagtttctccccgcactggccgaggaagtccagattcacctggtggaagctctgcccatcgttctgaacatgttcgagaaaaagctgagcagctacgcgcaaagccatctggaaaacacttccatcaaagtacacctgagaaccgctgtggccaaggtggaagagaagcaactgctggccaagaccaagcacgaggacggcaaaattaccgaagaaaccattccctacggcaccttgatttgggccacgggcaacaaggccagacccgtgatcaccgaccttttcaagaagatccctgagcagaactcgtccaagcggggcctggcagtgaacgacttcctgcaggtggagggcagcaacaacatcttcgccattggcgacaatgcatttgctggcctgcctcctaccgcccaggtggcgcaccaggaggccgagtacctggccaagaattttgacaagatggctcaaatccccaatttccagaagaatctgtcctcccggaaggataagatcgacctcctgttcgaggagaacaacttcaagcccttcaaatacaacgatctgggtgccctggcatacctgggctccgaaagagccattgcaaccatccgtagcggcaagagaaccttttacaccggtggtggcttaatgaccttctacttatggcggatcctgtacctgtccatgatcctgagcgccagatcgagattaaaggtcttcttcgactggatcaaactggcatttttcaagagagacttcttcaagggactgtag

SEQ ID NO: 190 - DNA, 1542 bp, Artificial Sequence
  source: /note="Description of Artificial Sequence: Synthetic polynucleotide"
atgctaagcaagaacttgtatagtaacaagcggctgctcacctcgacgaatacgctagtccgcttcgcttccaccagatccaccggggtggaaaactccggggctggccctacctctttcaagaccatgaaagtcatcgaccctcagcacagcgacaagcccaacgtgctgatcctgggctctgggtggggcgccatcagctttctgaagcacattgacaccaagaagtacaacgttagcatcatctctcctagaagctacttcctgtttacgcctctgttacccagcgccccagttggaacagtggacgagaagtccattattgagcccatcgtgaacttcgctctcaagaaaaagggcaacgttacctactatgaggcagaggccacctctatcaatcccgaccggaacaccgttaccatcaagagcctgagcgccgttagccagctgtaccagcccgaaaaccatctggggctgcaccaagccgagcctgccgagattaagtacgactacctgatcagtgccgtaggcgcggagcccaacacctttggaattcccggggtgactgactacggtcacttcctggaggagattcccaacagcttggaaatacggagaacctttgccgccaacctagaaaaggctaacctgctgcctaagggcgaccccgagcggagaagactgctgagcatcgtggtggttggtggaggccccacaggcgtagaagccgctggtgagctgcaggactacgtgcaccaggacctgagaaagttcctccccgccttggccgaggaagtgcaaattcacctggtggaagccctgcccatcgttttgaatatgttcgagaagaagctgtcaagctacgcccaatcacacttagaaaacacttcgatcaaagtacatctgagaacggccgtggccaaggtggaagagaagcagctgctggccaagaccaagcacgaggacggcaaaattaccgaggaaaccatcccatacggtaccctgatttgggccacgggtaacaaggcaagaccggtgatcactgacctgttcaagaagatccccgagcagaacagcagcaagagaggattggcagtgaacgacttcctgcaggtcaaaggcagcaacaacatcttcgccatcggtgacaacgcctttgccgggctgccaccaacagcccaggtggcccaccaggaggccgaatacttggccaagaatttcgacaaaatggctcagatcccaaatttccagaagaacctatcctccagaaaggataagattgacctgctgttcgaggagaacaacttcaagcccttcaagtacaacgacctgggcgccctggcctacctgggatccgaaagagccattgccaccatcagaagcggtaagcggaccttttacaccggtggaggcctgatgaccttctacctgtggcggattctgtacctgagcatgatcctaagcgcccgcagcagactgaaggtcttcttcgactggattaaattagccttcttcaaaagggactttttcgagggcttatga

SEQ ID NO: 191 - DNA, 1542 bp, Artificial Sequence
  source: /note="Description of Artificial Sequence: Synthetic polynucleotide"
atgctgtcgaagaatttgtacagcaacaagcggctgctcaccagcacgaacaccctcgtgagattcgctagcaccagatccaccggcgtggaaaacagcggggcaggccccacctctttcaagaccatgaaggtcattgacccccagcacagcgacaagcccaacgtgctgatactgggttctggctggggagctatcagctttttaaagcacatcgacaccaagaagtacaacgtctccatcatcagccccagaagctacttcttattcacgcctttgctgccctctgcacctgttggaaccgtagacgagaagtcaatcattgagcccatcgtgaatttcgccctcaagaaaaaggggaacgtcacctactatgaggcagaagccaccagcatcaaccccgaccggaataccgtgaccatcaagtcactgagcgccgtgagccagctataccagcccgaaaaccatctagggctgcaccaggccgagcccgccgagattaagtacgactatctgatcagcgctgtaggcgcggaacccaacacatttggaatccccggcgtcactgactacggtcatttcctgaaagaaatccccaactctttggaaatccggcggacttttgccgccaacctagaagaggccaacctgttgcctaagggcgaccccgagagaagaaggctactgtccattgtggtggtgggcggtgggcccacaggcgtggaagctgctggcgaactgcaggattacgtgcaccaggacctgagaaagtttctccctgccttggccgaagaagtccagattcacctggtggaagccctgcccatcgtgttgaatatgtttgagaaaaagctgagcagctacgcgcaaagccacttagaaaacacctccatcaaggtgcacctgagaacggctgtggccaaagtggaagaaaagcagctgctggccaagaccaagcacgaggacggcaagataaccgaggaaaccatcccctacggtaccctgatttgggccaccggtaacaaggccagaccggtgatcactgacctgttcaagaagatccctgagcagaactcgtccaagcggggactggccgtgaatgacttcctgcaggtgaaaggcagcaacaacatcttcgccatcggcgacaatgcctttagcggcctgccacctaccgcccaagtggcccaccaggaagccgagtacctggccaagaacttcgataaaatggctcaaataccaaatttccaaaagaatctgtcctcccggaaggataaaattgacctcttgttcgaggaaaacaacttcaagcctttcaaatacaacgatctgggcgccttagcatacctgggcagcgaaagagccattgcaaccatccgtagcggtaagagaaccttttacaccggcggaggcctgatgaccttctacctgtggcggattctgtacttgagcatgatcctgagcgccagaagcagactgaaggtgttcttcgactggatcaagctggcattcttcaagagagactttttcaagggcttatga

SEQ ID NO: 192 - DNA, 1542 bp, Artificial Sequence
  source: /note="Description of Artificial Sequence: Synthetic polynucleotide"
atgctgtcgaagaacctgtatagcaacaagcggctgctgaccagcaccaacacgctagtcagattcgcctccaccagatccacaggcgtggaaaacagcggagctggtcccacctctttcaagaccatgaaggtcatcgaccctcagcacagcgacaagcccaacgtgctgatcctgggctcgggctggggcgctattagctttctgaagcacatcgacaccaagaagtacaacgttagcatcatcagccccagaagctatttcttattcacgcccctgttacccagcgccccagtggggaccgtggacgagaagtccattatcgagcccatcgtgaattttgctctgaagaaaaagggcaacgtcacctactacgaggcagaagccaccagcatcaaccccgaccggaacaccgttaccataaaaagcttatctgccgtgtcccagctgtaccaacccgagaaccacctggggctgcaccaagcagagcccgccgagattaagtacgattacttaatcagcgccgtaggtgccgaacctaacacatttggaatccccggcgtgaccgattacggccacttcctgaaagagattcccaactctctggaaatccggagaacttttgccgccaacctagagaaggctaacctgttgcctaagggtgaccccgaaagaagaaggctactgtccattgtggtggttggcggtgggcctacaggtgtggaagccgctggcgagctgcaggattacgtgcaccaggacctgagaaagttcctgcccgcactggccgaagaagtccaaattcacctggtggaagccctgcccatcgttctgaacatgttcgagaagaagctgagctcatacgcgcagtcacacctggaaaacacctcgatcaaggtgcatctgagaaccgctgtcgccaaagttgaagagaagcagttgttggccaagaccaagcacgaagacggcaagataaccgaagaaactatcccctacggcaccctgatttgggccacgggcaacaaggcaagaccggtaatcactgacctgttcaagaagatccccgagcaaaacagcagcaagcggggcctggcagtgaacgacttcttgcaggtcaaaggcagcaacaacatcttcgccattggcgacaacgcatttgccgggctgccacctaccgcccaggtggcgcaccaggaggccgaatacatcgccaagaactttgacaagatggcccagatccccaatttccagaagaacctgtcctcaagaaaggataagattgacctcctgttcgaggaaaacaacttcaagcctttcaagtacaacgatttaggcgccttagcatacctgggcagcgaaagagccattgccaccatccgtagcggcaagcggaccttttacaccggtggaggcttaatgaccttctacctgtggcggatcctgtacatgtccatgattctgagcgccagatcgagactgaaggtgtttttcgactggattaagctggccttcttcaaaagggacttctttaagggcttatga

SEQ ID NO: 193 - DNA, 1542 bp, Artificial Sequence
  source: /note="Description of Artificial Sequence: Synthetic polynucleotide"
atgctgtcgaagaacttgtatagtaaccggcggttgctcacctcgaccaacacgctagtgcgcttcgcttccaccagatccacaggcgtggaaaacagcggggctggccccacatcttttaagaccatgaaggtcatcgaccctcagcacagcgacaaacccaacgtgctgatactgggttctggctggggcgccatcagctttctgaagcacatcgacaccaagaagtacaacgtctccatcatcagccctagaagctatttcctgttcacgcccctgttaccttctgccccagttgggaccgtagacgagaagtcaattatcgagcccatcgtgaattttgccctgaagaaaaagggcaacgttacctactatgaggccgaagccacctctatcaatcccgacaggaacaccgtgaccataaaaagcctgagcgccgttagccagctgtaccagcctgaaaaccacctagggctgcatcaagccgaacctgctgaaattaagtacgactacctgatcagcgccgtaggcgccgagcctaacacctttggaattcctggggtcactgattacggccatttcctgaaggagatccccaacagcctggaaatacggagaaccttcgccgccaacctagaagaggctaacctgctgcctaagggtgatcccgaacggagaaggctgctgtccatcgtggtcgtgggtggtgggcccacaggcgtggaagccgctggcgagctgcaggactacgtgcaccaggacctgcggaagttcctgcctgccctggccgaggaagtgcagattcacctggtcgaagctctgcccatcgttctgaacatgtttgagaagaagctgagctcatacgcccagagccacctggaaaacacctcgatcaaggtgcacctgagaacggctgtcgccaaggttgaagagaagcaactgctggccaagaccaagcacgaggacggcaagattaccgaggaaactatcccctacggcaccttgatttgggccacgggcaacaaggcaagacccgtgatcaccgaccttttcaagaagatccccgagcagaacagcagcaagagaggactggcagtgaacgacttcttgcaggtcaaaggcagcaacaacatcttcgccatcggtgacaacgcatttgctggcctgcctcctaccgcccaggtggcccaccaggaggccgagtacttggccaagaatttcgataagatggctcagatacccaatttccagaagaatctgtcctcccggaaggataagatcgatctgctgttcgaggaaaacaacttcaagcctttcaagtacaacgacctgggcgccttagcctacctgggatccgaaagggccattgccaccatacgtagcggcaagcggacattctacaccggcggaggcctgatgaccttctacttatggcggattctgtacttgtccatgatcctgagcgcacgcagcagactgaaggtgtttttcgactggatcaaattagcattcttcaaaagggacttcttcaaaggcctgtga

SEQ ID NO: 194 - DNA, 1542 bp, Artificial Sequence
  source: /note="Description of Artificial Sequence: Synthetic polynucleotide"
atgctatcgaagaacctgtacagcaacaagaggttgctgacctcgaccaacaccctcgtgagattcgccagcaccagatccaccggcgtcgaaaactccggggcaggtcccacctctttcaagaccatgaaagtcatcgacccccagcacagcgacaagccaaacgtgctgatactgggctctggctggggagccattagctttctgaagcacattgacaccaagaagtacaacgtttccatcatctctcctagaagctacttcttattcacgcccctgatgccttctgccccagtgggaacagtggacgaaaagtccatcatcgagcccatcgtgaatttcgctctgaagaaaaaggggaacgtcacctactatgaggccgaggccacctctatcaaccccgacaggaacaccgttaccatcaagagcctgagcgccgtgtcccagctataccagcccgaaaaccacctgggcctgcaccaagccgaacctgccgagattaagtacgactacctgatcagtgccgtgggcgccgagcccaacacatttggaattcccggggtcactgattacggccacttcctggaggagatccccaactctctggaaatccggcggaccttcgccgccaacctggaaaaggccaacctgttgccaaagggcgaccccgaaagaagaaggctgctgtccatcgtggtggtgggtggagggcccactggtgtggaagccgctggcgagctgcaggactatgttcaccaggacctgcggaagtttctgcccgccctggccgaggaagtgcaaattcacctggtcgaagccctgcccatcgtgctgaacatgtttgagaagaagctgagcagctacgcccagtcacacttagaaaacacctcgatcaaggtacacctgagaaccgctgtggccaaagtggaagaaaagcaattgctggcaaagaccaaacacgaggacggtaagataaccgaggaaaccattccctacggtaccctgatttgggccaccggcaacaaggcaagacccgtgatcaccgacctgttcaagaagattcccgagcagaactcgagcaagagaggactggcagtgaacgactttctgcaggtgaaaggcagcaacaacatcttcgccatcggtgacaacgcatttgctggcttgccacctacagcccaagtggcccaccaagaagccgaatatttggccaagaatttcgacaagatggctcagatacccaatttccagaagaacctgtcctcccggaaggataagattgatctgttgttcgaggagaacaactttaaacccttcaagtacaacgatttaggtgccctggcatacctgggcagcgaaagagccattgcaaccatacgttccggtaagcggacattctacaccggtggtggcctgatgaccttctacctgtggcggatcctgtacttgtccatgattctgagcgccagaagcagactgaaggtgtttttcgactggattaagttagcctttttcaagagggacttttttaagggcctgtga

SEQ ID NO: 195 - DNA, 1542 bp, Artificial Sequence
  source: /note="Description of Artificial Sequence: Synthetic polynucleotide"
atgctgtcgaagaacctgtacagcaacaagaggttgctcaccagcaccaacaccctcgtcagattcgctagcaccagatccaccggcgtcgaaaactccggggctggtcccacaagctttaagaccatgaaggtcattgacccccagcacagcgacaaacccaacgtgctgatcctgggctctgggtggggcgctattagctttttaaagcacattgacaccaagaagtacaacgtcagcatcatcagccccagaagctatttcttattcacccccctgttaccttctgccccagtgggaaccgtggacgaaaagtcaattattgagcccatcgttaactttgctctgaagaaaaagggcaacgtcacctactacgaggccgaggccaccagcatcaaccccgacaggaataccgttaccatcaagagcttatctgccgttagccagctgtaccagcccgaaaaccatctgggcctgcaccaggccgagcccgccgagattaagtacgactacttaatcagtgccgtgggcgcggaacccaacacatttggaattcccggggtcaccgactacggccacttcctgaaggaaatccccaacagcctggaaatccggcggaccttcgccgccaatctggaaaaggccaacctgttgcctaagggcgaccccgagcggagaaggctgctgagcattgtcgtcgtgggcggagggcctactggtgtggaggctgctggcgagctgcaggactatgtgcaccaggacctgcggaagtttttccccgccttggccgaagaagtgcaaattcacctggtcgaagctctgcccatcgttctgaacatgttcgagaagaagctgtcatcatacgcccagtcacacttagaaaacacttccatcaaggtgcacctgagaacggccgtggccaaagttgaagagaagcaactgctggccaagaccaagcacgaggacggcaagataaccgaggaaaccatcccctacggtactctgatttgggccaccggtaacaaggcaagacccgtaatcactgacctgttcaagaagatccccgagcagaacagcagcaagagaggattggccgtgaacgactttttgcaggtcaaaggcagcaacaacatcttcgccatcggcgacaatgcctttgccggcttgcctcctacagcccaggtagcgcaccaggaggccgaatatctggccaagaatttcgacaaaatggcccagatacccaatttccagaagaacctatcttccagaaaggataagatcgatctcttgttcgaggaaaacaacttcaagcctttcaaatacaacgatttaggtgccttagcctacctgggcagcgaaagagccattgccaccatacgttccggtaagcggacattttacaccggtggtggcctgatgaccttctacttatggagaatcttgtacctgagcatgatcctatctgccagaagcagactgaaggtgttcttcgactggatcaaactggccttcttcaaaagggacttcttcgagggattatag

SEQ ID NO: 196 - DNA, 1542 bp, Artificial Sequence
  source: /note="Description of Artificial Sequence: Synthetic polynucleotide"
atgctgagcaagaacctgtacagcaacaagaggctgctgaccagcaccaacacgctcgtccgcttcgcctccaccagatccaccggggtggaaaacagcggagcaggccctacctcttttaagaccatgaaggtcatcgacccccagcacagcgacaagcccaacgtgctgatcctgggctctggctggggagccatctcgtttctgaagcacatcgacaccaagaagtacaacgtttccatcatcagccccagaagctatttcttatttacgcctctgctgcctagcgcccctgtggggacagtggacgaaaagtccattatcgagcccatcgtgaactttgctctcaagaaaaaggggaacgtcacctactatgaggcagaggccaccagcatcaatcccgaccggaacaccgttaccatcaagagcctgagcgccgtgtcccagctataccaacccgagaaccacctgggcctgcatcaagcagagcccgctgaaattaagtacgattacttaatcagcgctgtaggcgccgagcctaacacatttggaatccccggggtgaccgattacggtcacttcctgaaggaaattcccaacagcctggaaatcagacggaccttcgccgccaacctagagaaggccaacttattgcctaagggtgaccccgaaagaagaagactactgagcatcgtcgtcgtgggcggaggccccactggtgtggaggctgctggcgagctacaggactacgttcaccaggacctgagaaagttcctgcccgccctggccgaagaagtccagattcacctggtggaagccctgcccatcgtgctgaatatgtttgagaaaaagctgtcaagctacgcccagagccacctggaaaacacctccatcaaagtacatctgagaaccgccgtggccaaggttgaagagaagcagttgctggccaagaccaagcacgaggacggcaagataaccgaagaaaccatcccctacggcaccctgatttgggccaccggcaacaaggccagacccgtgatcactgacctgttcaagaaaattcccgagcaaaactcgagcaagcggggcttggcagtgaacgacttcttgcaggtcaaaggcagcaacaacattttcgccattggcgacaacgcctttgccggcctgcctccaacagcccaagtggcgcaccaggaggccgaatacctggccaagaatttcgataaaatggcccagataccaaatttccaaaagaacctatcctcccggaaggataagatcgatctgctgttcgaggaaaacaactttaagcctttcaagtacaacgatctgggtgccttagcatacctgggaagcgaaagagccattgccaccatcagatccggtaagagaacattctacaccggcggtggcttaatgaccttctacctgtggagaatcctgtacatgtccatgatcctgtctgcaagatcgagattaaaggtgtttttcgactggatcaagatggccttcttcaagagggacttcttcaaaggactgtag

SEQ ID NO: 197 - DNA, 1542 bp, Artificial Sequence
  source: /note="Description of Artificial Sequence: Synthetic polynucleotide"
atgctatcgaagaacctgtacagtaacaagaggttgctgaccagcacgaacacgatggtgcgcttcgcctccaccagatccaccggggtcgaaaactccggggctggccctacctctttcaagaccatgaaagtcatcgacccccagcacagcgacaagcccaacgtgctgatcctgggctctgggtggggcgctatctcgtttctgaagcacattgacaccaagaagtacaacgttagcatcatcagccccagaaagtacttcctgtttacccctttgctgccctctgcccctgttggaaccgtagacgagaagtcaattatcgagcccatcgttaattttgctctgaagaaaaaggggaacgtcacctactacgaggcagaggccaccagcatcaaccccgaccggaacaccgtgaccataaagtcactgtctgccgtttcccagctgtaccagcccgaaaaccacctgggcctgcaccaagccgaacccgccgaaattaagtacgactacctgatcagcgctgtgggtgccgagcccaacacctttggaattcccggggtcaccgactacggccacttcctgaaggagattcccaactctctggaaatcagacggacttttgccgccaatctagagaaggccaacttattgcctaagggcgaccccgaacggagaagactgctgagcatcgtggtggtgggcggaggccccacaggtgtggaggctgctggcgaactgcaggactacgtgcaccaggacctgagaaagtttctgcctgccctggccgaagaagtgcaaattcacctggtggaagctctgcccatcgtgttgaacatgttcgagaagaagctgtcaagctacgcccaaagccacttagaaaacacttccatcaaagtacacctgagaaccgccgtggccaaggttgaagagaagcagctgctggccaagaccaagcacgaggacggcaagataaccgaagaaaccatcccatacggtactctgatttgggccaccggtaacaaggccagacccgtgatcactgacctgttcaagaagattcccgagcaaaacagctccaagcggggcttggccgtgaacgacttcctgcaggtgaaaggcagcaacaacatcttcgccatcggcgacaacgcatttgccgggttgcctcctaccgcccaggtggcccaccaggaggccgaatacctggccaagaactttgataaaatggctcaaatacccaatttccagaagaacctatcctcacggaaggataaaatcgacctgctgttcgaggaaaacaacttcaagcccttcaagtacaacgacctgggtgccctggcctacctgggcagcgaaagagccattgccaccataagaagcggtaagagaacattctacaccggtggtggcttaatgaccttctacttatggagaattttgtacctgtccatgattctatctgcacgcagcagattaaaggtgtttttcgactggatcaagttagcatttttcaaaagggacttctttaaaggcctgtga

SEQ ID NO: 198 - DNA, 1542 bp, Artificial Sequence
  source: /note="Description of Artificial Sequence: Synthetic polynucleotide"
atgctgtcgaagaacttgtacagcaaccggaggttgctgaccagcaccaatacgctcgtccgcttcgcttccaccagatccaccggcgtggaaaactccggggctggtcctacctctttcaagaccatgaaagtcatcgaccctcagcacagcgacaaacccaacgtgctgatactgggttcggggtggggcgctatcagctttctgaagcacatcgacaccaagaagtacaacgtcagcatcatcagccccagaagctacttcctgtttacccccttgctgccctctgcccctgttggaaccgtggacgaaaagtccatcatcgagcccatcgtgaacttcgccctcaagaaaaagggcaacgttacctactatgaggccgaagccaccagcatcaatcccgaccggaataccgttaccataaaaagcctgagcgccgtttcccagctgtaccagcctgagaaccacctagggctgcaccaggcagaacctgctgaaattaagtacgactacctgatcagtgctgtgggcgccgagcctaacacctttggtatccccggggtgaccgactacggccacttcctgaaggagattcccaactctttggaaatcagacggaccttcgccgccaatctagagaaggccaacctgctgcctaagggtgaccccgaaagaagaaggctgctgagcatcgtggtcgtgggcggagggcccacaggcgtggaggctgctggtgagctacaggattacgtgcaccaggacctgcggaagttcctccctgccctggccgaagaagtgcaaattcacttggtggaagccctgcccatcgttctgaatatgttcgagaagaagctttcatcatacgcccagtcacacctggaaaacacctcgatcaaggtacacctgagaacggctgtcgccaaagtggaagaaaagcaactgctggccaagaccaagcacgaggacggcaagattaccgaggaaaccatcccatacggcaccttgatttgggccaccggcaacaaggcaagacccgtgatcaccgacctgttcaagaaaatccccgagcaaaacagctccaagagaggcctggccgtgaatgacttcctgcaggtgaaaggcagcaacaacatcttcgccatcggtgacaatgcatttgctggcttgcctccaaccgcccaagtggcgcaccaggaagccgaatacttggccaagaacttcgacaaaatggcccagatccccaatttccagaagaatctgtcttccagaaaggataagatcgacctcctgttcgaggaaaacaacttcaaacccttcaagtacaacgatctgggcgccctggcctacctgggatccgaaagagccattgccaccataagaagcggtaagcggaccttttacaccggtggtggcttaatgaccttctacttatggcggatcctgtacttgagcatgattctgtctgcccgctcgagactgaaggtgttcttcgactggattaagctggccttcttcaagagagactttttcgagggcctgtga

SEQ ID NO: 199 - DNA, 1542 bp, Artificial Sequence
  source: /note="Description of Artificial Sequence: Synthetic polynucleotide"
atgctgtcgaagaatctgtacagtaacaagaggctgctgaccagcaccaacaccatggtccgcttcgcctccaccagatccacaggcgtcgaaaacagcggggctggccccaccagcttcaagaccatgaaggtcatcgacccccagcacagcgacaagcccaacgtgctgatactgggctcggggtggggcgctattagctttctgaagcacattgacaccaagaagtacaacgtcagcatcatctctcccagaagctacttcttattcacccccctgctgcctagcgcccctgtgggaacagtagacgagaagtccatcatcgagcccatcgttaacttcgccctcaagaaaaagggcaacgtcacctactatgaggccgaggccacctctatcaaccccgaccggaacaccgtgaccataaagagcctgtctgccgttagccagctgtaccaacctgagaaccatctaggcctgcatcaggccgagcctgctgagattaagtacgattatctgatcagcgccgtaggcgccgagcccaacacctttggaatccccggggtcactgattacggtcatttcctgaaggagatccccaacagcttggaaatcagacggacctttgccgccaacctagaaaaggccaacctgctgccaaagggcgaccccgagcggagaagactactgagcattgtcgtcgtgggcggtgggcccacaggtgtagaagccgctggtgaactgcaggattatgtgcaccaggacctgcggaagttcctgcccgcactggccgaggaagtccagattcacctggtggaagccctgcccatcgttttgaatatgttcgagaaaaagctgagcagctacgcccagtcacatttagaaaacacctcgatcaaggtgcacctgagaaccgccgtggccaaagtggaagaaaagcagctgttggcaaagaccaagcacgaagacggcaaaattaccgaggaaactattccatacggcaccctgatttgggccaccggcaacaaggcaagaccggtgatcactgaccttttcaagaaaatccccgagcagaactcgtccaagagaggcctggccgtgaatgacttcttgcaggtgaaaggcagcaacaacattttcgccattggcgacaatgcctttgccgggttgcctcctacagcccaggtggcccaccaggaggccgagtacatcgccaagaattttgataagatggctcaaataccaaatttccagaagaacctgtcttccagaaaggataagatcgatctgttgttcgaggaaaacaacttcaagcccttcaaatacaacgacttaggtgccctggcctacctgggcagcgaaagggccattgccaccataagatccggtaagcggaccttctacaccggcggaggcctgatgaccttctacttatggagaatcctgtacttgtccatgattctgtctgccagaagcagactgaaggtgtttttcgactggattaaattagccttcttcaagagggactttttcaagggcttatag

SEQ ID NO: 200 - DNA, 1542 bp, Artificial Sequence
  source: /note="Description of Artificial Sequence: Synthetic polynucleotide"
atgctgtcgaagaacctgtatagtaacaagaggctgctcacctcgacgaacaccctcgtgcgcttcgccagcaccagatccaccggcgtcgaaaacagcggggctggtcctacctcttttaagaccatgaaggtcatcgacccccagcacagcgacaaaccaaacgtgctgatcctgggctctggctggggagccatcagctttctgaagcacattgacaccaagaagtacaacgtctccatcatctctcccagaagctacttcctgttcacccctctgctgcccagcgcccctgtgggaaccgtggacgagaagtcaatcatcgagcccatcgttaactttgccctgaagaaaaaggggaacgttacctactatgaggccgaggccacctctatcaaccccgacaggaacaccgtgaccatcaagtcactgagcgccgttagccagctataccagcctgagaaccatctaggcctgcaccaggccgaacccgccgagattaagtacgactacttaatcagcgccgtgggcgcggaacctaacacatttggaatccctggcgtgaccgactacggtcacttcctgaaagagatccccaacagcctggaaatccggcggacttttgccgccaatctagaagaggctaacctgttgcctaagggcgaccccgagcggagaagactactgagcattgtggtcgttggcggagggcccacaggtgtagaagctgctggcgagctacaggattatgtgcaccaggacctgcggaagtttctgcctgccttggccgaggaagtccagattcacctggtcgaagctctgcccatcgttctgaatatgtttgagaagaagctgtcatcatacgcgcaatcacacctggaaaacacttcgatcaaggtacatctgagaacggccgtcgccaaagtggaagagaagcagctgttggcaaagaccaaacacgaggacggcaaaattaccgaagaaactatcccatacggtaccttgatttgggccaccggcaacaaggccagacccgtaatcactgacctgttcaagaaaatccccgagcagaacagcagcaagagaggactggccgtgaacgacttcttgcaggtcaaaggcagcaacaacatcttcgccatcggtgacaatgcatttagcggcctgccaccaacagcccaagtagcccaccaagaggccgagtacctggccaagaactttgataaaatggctcagatccccaatttccaaaagaacctgtcttcacggaaggataagattgatctcttgttcgaggaaaacaacttcaagcccttcaagtacaacgatctgggtgccctggcatacctgggaagcgaaagagccattgccaccataagaagcggcaagcggacattttacaccggcggaggcctgatgaccttctacctgtggcggattctgtacctgagcatgattctatctgccagatcgagactgaaggtgttcttcgactggatcaaactggcctttttcaagagggacttcttcaagggcctgtga

SEQ ID NO: 201 - DNA, 1542 bp, Artificial Sequence
  source: /note="Description of Artificial Sequence: Synthetic polynucleotide"
atgctgtcgaagaatctgtacagcaacaagcggctgctgaccagcaccaatacgctcgtgcgcttcgcttccaccagatccacaggcgtggaaaactccggggcaggtcctaccagctttaagaccatgaaagtcattgaccctcagcacagcgacaaacccaacgtgctgatcctgggctcgggctggggcgctatcagctttttaaagcacatcgacaccaagaagtacaacgtcagcatcatcagccctagaagctatttcctgttcacccccctgctgcctagcgccccagtggggacagtggacgagaagtcaatcatcgagcccatcgttaattttgccctgaagaaaaagggcaacgtcacctactatgaggcagaagccacctctatcaatcccgaccggaacaccgttaccatcaagagcctgagcgccgtgtcccagctgtaccagcccgaaaaccatctgggcctgcatcaagccgagcctgctgagattaagtacgattacttaatcagtgccgtaggcgccgaacctaacacctttggtattcctggcgtgaccgactacggtcacttcctgaaagagatccccaacagcctggaaatcagacggaccttcgccgccaatctggaaaaggccaacttactgccaaagggcgaccccgaacggagaagactactgagcatcgtggtcgtgggtggagggcccactggtgtagaggctgctggcgaactgcaggattacgttcaccaggacctgcggaagttcttccctgccctggccgaggaagtgcagattcacttggtcgaagccctgcccatcgtgctgaacatgttcgagaagaagcttagctcatacgcccagagccacctggaaaacacctccatcaaggtgcacctgagaaccgccgtcgccaaagttgaagagaagcaactgttggccaagaccaagcacgaggacggtaagataaccgaggaaaccatcccctacggtaccttgatttgggccaccggcaacaaggcaagacccgtaatcactgaccttttcaagaaaatccctgagcagaacagcagcaagagaggcttggcagtgaacgactttctgcaggtcaaaggcagcaacaacattttcgccatcggtgacaatgcctttgctggcctgccaccaacagcccaggtggcccaccaggaggccgagtacctggccaagaatttcgacaaaatggctcaaatccccaatttccagaagaacctatcctccagaaaggataaaatcgacctgctgttcgaggagaacaacttcaagcccttcaaatacaacgatttaggcgccctggcctacctgggcagcgaaagagccattgcaaccataagatccggtaagagaaccttctacaccggcggaggcctgatgaccttctacttatggagaattttgtacctgtccatgattctgtctgcacgcagcagactgaaggtctttttcgactggatcaagatggccttcttcaaaagagacttcttcaaaggcctgtag

SEQ ID NO: 202 - DNA, 1542 bp, Artificial Sequence
  source: /note="Description of Artificial Sequence: Synthetic polynucleotide"
atgctgtcgaagaacctgtacagtaacaagcggttgctgaccagcacgaacaccctagtgcgcttcgcttccaccagatccacaggcgtcgaaaactccggagctggccccacatctttcaagaccatgaaggtcatcgaccctcagcacagcgacaagcccaacgtgctgatactgggctcggggtggggcgccatcagctttttaaagcacattgacaccaagaagtacaacgtctccatcatctctcccagaagctatttcctgttcacgcccttgttacccagcgcccctgttggaaccgtggacgagaagtccatcattgagcccatcgtgaacttcgctctcaagaaaaaggggaacgttacctactatgaggcagaagccaccagcatcaaccccgacaggaataccgttaccataaagtcattatctgccgttagccagctataccaacccgaaaaccatctggggctgcatcaggccgaacccgccgagattaagtacgactatctgatcagcgccgtaggcgcggagcctaacacctttggaatccctggcgtgaccgattacggccatttcctgaaagagatccccaacagcttggaaatccggcggaccttcgccgccaacctggaagaggctaacctgttgccaaagggtgatcccgagagaagaaggctgctgtccattgtggtcgtgggtggtggccccacaggtgtggaagctgctggtgaactgcaggactatgttcaccaggacctgagaaagtttctgcccgccctggccgaggaagtgcagattcacctggtggaagctctgcccatcgtgctgaacatgttcgagaagaagcttagcagctacgcccaatcacatttagaaaacacttcgatcaaagtgcacctgagaacggccgtggccaaggtggaagaaaagcagctgctggccaagaccaaacacgaggacggcaaaattaccgaggaaaccattccctacggtaccctgatttgggccaccggcaacaaggccagaccggtgatcactgacctgttcaagaagattcctgagcaaaacagctccaagcggggcctggccgtgaacgacttcctgcaggtcgagggcagcaacaacattttcgccatcggcgacaacgcctttgctgggctgcctccaacagcccaggtagcgcaccaggaggccgagtacttggccaagaacttcgacaagatggcccagatccccaatttccaaaagaacctatcctcccggaaggataaaattgacctcctgttcgaggagaacaacttcaaacccttcaagtacaacgacttaggcgccttagcatacctgggcagcgaaagagccattgccaccataagaagcggtaagagaaccttttacaccggcggtggcctgatgaccttctacctgtggcggatcctgtacctgagcatgattctaagcgcccgctcgagattaaaggtcttcttcgactggattaaactggcctttttcaaaagggacttcttcaaaggcctgtag

SEQ ID NO: 203 - DNA, 1542 bp, Artificial Sequence
  source: /note="Description of Artificial Sequence: Synthetic polynucleotide"
atgctgtcgaagaatttgtatagtaacaagcggttgctgaccagcaccaataccctagtgcgcttcgccagcaccagatccaccggcgtggaaaactccggggctggtcccacatctttcaagaccatgaaagtcatcgaccctcagcacagcgacaaacccaacgtgctgatcctgggctcggggtggggagccatctcgtttctgaagcacatcgacaccaagaagtacaacgtcagcatcatctctcctagaagctatttcctgtttacgcctctgctgcctagcgcaccagtgggaaccgtggacgagaagtcaatcatcgagcccatcgtgaacttcgccctcaagaaaaagggcaacgttacctactacgaggccgaagccaccagcatcaatcccgacaggaacaccgtgaccatcaaaagcctgagcgccgtgtcccagctgtaccaacccgagaaccatctagggatgcaccaggccgaacccgccgaaattaagtacgattatctgatcagcgctgtaggcgccgagcctaacacatttggaatccccggggtgaccgactacggtcatttcctgaaggagatccccaacagcttggaaatacggcggactttcgccgccaatctagagaaggccaacctgttgcctaagggcgatcccgaaagaagaaggctgctgagcatcgtggtcgttggtggaggccccacaggtgtagaggctgctggtgaactgcaggactatgtgcaccaggacctgagaaagttcctgcccgccctggccgaagaagtgcagattcacttggtggaagccctgcccatcgtgttgaacatgttcgagaagaagctgagctcatacgcgcagagccacttagaaaacacttccatcaaagtacacctgagaaccgctgtggccaaggttgaagagaagcaattgctggcaaagaccaaacacgaagacggcaagattaccgaggaaactattccctacggcactttgatttgggccaccggcaacaaggccagaccggtgatcactgacctgttcaagaagatccctgagcagaacagcagcaagcggggcctggccgtgaatgacttcctgcaggtgaaaggcagcaacaacattttcgccatcggcgacaacgcatttgctggcttgcctccaacagcccaggtggcccaccaggaggccgagtacctggccaagaactttgataagatggctcagatccccaatttccagaagaacctatcctccagaaaggataaaattgacctgctgttcgaggaaaacaacttcaaacccttcaagtacaacgatctgggcgccttagcctacctgggcagcgaaagagccattgcaaccataagaagcggtaagagaacattctacaccggtggaggcctgatgaccttctacctgtggagaatcctgtacctgagcatgattctatctgcccgctcgagactgaaggtcttcttcgactggatcaagctggcattcttcaaaagagactttttcgagggcctgtag

SEQ ID NO: 204 - DNA, 1542 bp, Artificial Sequence
  source: /note="Description of Artificial Sequence: Synthetic polynucleotide"
atgctaagcaagaacttgtacagcaacaagaggctgctgacctcgaccaacaccctcgtgcgcttcgcctccaccagatccaccggcgtcgaaaacagcggagctggtcctacaagctttaagaccatgaaagtcatcgacccccagcacagcgacaaacccaacgtgctgatcctgggctctgggtggggagccatctcgtttttaaagcacattgacaccaagaagtacaacgttagcatcatctctcccagaagctacttcttattcacccccctgctgcccagcgcccctgttgggaccgtggacgagaagtccatcattgagcccatcgtgaatttcgccctgaagaaaaaggggaacgttacctactacgaggccgaggccacctctatcaaccccgacaggaataccgtgaccatcaagagcctgtctgccgtgtcccagctgtaccagcccgagaaccacctaggcctgcatcaagccgagcccgccgagattaagtacgactatctgatcagtgccgtaggcgcggagcctaacacctttggtattcctggggtgaccgactacggtcacttcctgaaggagattcccaactctctggaaatccggcggacctttgccgccaacctggaaaaggctaacttactgcctaagggtgatcccgagcggagaagactgctgtccattgtcgtggttggcggagggcctactggtgtggaagctgctggtgagctacaggactacgtgcaccaggacctgcggaagttcctgcctgccttggccgaggaagtgcagattcacctggtggaagccctgcccatcgtgctgaacatgtttgagaagaagctgagcagctacgcgcaatcacatttagaaaacacctccatcaaggtgcatctgagaaccgccgtcgccaaggtggaagaaaagcagttgctggccaagaccaaacacgaggacggcaaaattaccgaagaaaccatcccctacggtaccctgatttgggccaccggtaacaaggccagacccgtaatcaccgaccttttcaagaaaatccccgagcaaaactcgtccaagcggggcttggccgtgaacgacttcctgcaggtcgagggcagcaacaacattttcgccatcggcgacaatgcctttagcgggttgcctcctaccgcccaagtggcccaccaggaagccgagtacttggccaagaactttgacaaaatggctcaaatcccaaatttccaaaagaacctgtcctcccggaaggataaaattgatctgctgttcgaggagaacaacttcaagcctttcaagtacaacgacttaggcgccttagcatacctgggatccgaaagagccattgcaaccatcagatccggcaagagaaccttctacaccggcggaggcttaatgaccttctacctgtggcggatcctgtacctgagcatgattctgagcgccagatcgagattaaaggtgtttttcgactggattaaattagcattcttcaaaagagactttttcaaaggactgtga

SEQ ID NO: 205 - DNA, 1542 bp, Artificial Sequence
  source: /note="Description of Artificial Sequence: Synthetic polynucleotide"
atgctgagcaagaacctgtacagcaaccggcggctgctgaccagcaccaacaccctcgtccgcttcgccagcaccagatccaccggcgtcgaaaacagcggagctggccccaccagctttaagaccatgaaggtcatcgacccccagcacagcgacaagcccaacgtgctgatcctgggctctggctggggagctatcagctttctgaagcacatcgacaccaagaagtacaacgtcagcatcatcagccccagaagctacttcctgttcacccctctgctgcccagcgcacctgtgggaaccgtggacgagaagtccatcatcgagcccatcgtgaacttcgccctgaagaaaaagggcaacgtcacctactatgaggccgaggccaccagcatcaaccccgaccggaacaccgtgaccatcaagagcctgagcgccgtgtcccagctataccagcccgagaaccacctgggcctgcaccaggccgagcccgccgaaattaagtacgactacctgatcagcgccgtgggcgccgagcccaacacctttggaatccccggcgtgaccgactacggccacttcctgaaagagatccccaacagcctggaaatccggcggactttcgccgccaacctggaaaaggctaacctgctgcctaagggcgaccccgaaagaagaaggctgctgagcatcgtggtcgtgggcggaggccccacaggcgtggaagctgctggcgagctgcaggattacgttcaccaggacctgcggaagttcctgcccgccctggccgaggaagtgcagattcacctggtggaagccctgcccatcgtgctgaatatgttcgagaaaaagctgagcagctacgcccagagccacctggaaaacacctccatcaaggtacacctgagaacggccgtggccaaggtggaagaaaagcagctgctggccaagaccaagcacgaggacggcaagattaccgaggaaaccatcccctacggtaccttgatttgggccaccggcaacaaggccagacccgtgatcaccgacctgttcaagaagatccccgagcagaacagcagcaagcggggcctggccgtgaacgacttcctgcaggtcgagggcagcaacaacatcttcgccatcggcgacaacgcctttgccggcctgcctcctacagcccaagtggcccaccaggaagccgagtacctggccaagaacttcgataagatggcccagatccccaatttccagaagaacctgtcctcccggaaggataagatcgacctgctgttcgaggaaaacaacttcaagcccttcaagtacaacgacctgggcgccctggcctacctgggcagcgaaagagccattgccaccatcagaagcggcaagcggacattctacaccggcggaggcctgatgaccttctacctgtggagaatcctgtacctgagcatgatcctgagcgcccgcagcagactgaaggtgttcttcgactggatcaagctggccttcttcaagagggactttttcaaaggcctgtga

SEQ ID NO: 206 - DNA, 1542 bp, Artificial Sequence
  source: /note="Description of Artificial Sequence: Synthetic polynucleotide"
atgctgagcaagaacctgtacagcaaccggcggctgctcaccagcaccaacaccctcgtgcgcttcgccagcaccagatccacaggcgtcgaaaacagcggggctggccccaccagcttcaagaccatgaaggtcatcgacccccagcacagcgacaagcccaacgtgctgatcctgggctctggctggggcgccatcagctttctgaagcacatcgacaccaagaagtacaacgtcagcatcatcagccctagaagctatttcctgttcacccccctgctgcccagcgcccctgtgggaaccgtggacgagaagtccattatcgagcccatcgtgaacttcgccctgaagaaaaaggggaacgtcacctactacgaggccgaggccaccagcatcaaccccgaccggaacaccgtgaccatcaagagcctgagcgccgtgtcccagctataccagcccgagaaccacctgggcctgcaccaggccgagcccgccgagattaagtacgactatctgatcagcgccgtgggcgccgagcccaacacatttggaatccccggggtgaccgactacggccacttcctgaaagagatccccaacagcctggaaatccggcggaccttcgccgccaacctggaaaaggccaacctgttgcctaagggcgaccccgagcggagaaggctgctgagcatcgtggtcgtgggcggaggccccacaggcgtagaagctgctggcgaactgcaggactacgtgcaccaggacctgcggaagttcctgcccgcactggccgaggaagtgcagattcacctggtggaagccctgcccatcgtgctgaacatgttcgagaagaagctgagcagctacgcccagtcacacctggaaaacacctccatcaaggtgcacctgagaaccgccgtggccaaggtggaagagaagcagttgctggccaagaccaagcacgaagacggcaagattaccgaggaaaccatcccctacggcactctgatttgggccaccggcaacaaggccagaccggtgatcaccgacctgttcaagaagattcccgagcagaacagcagcaagagaggcctggccgtgaacgacttcctgcaggtcaaaggcagcaacaacatcttcgccatcggcgacaacgcctttgccggcctgcctcctacagcccaggtggcccaccaggaagccgagtacttggccaagaacttcgacaagatggcccagatacccaatttccagaagaacctgtcctcccggaaggataagattgacctgctgttcgaggaaaacaacttcaaacccttcaagtacaacgacctgggcgccctggcctacctgggcagcgaaagggccattgccaccatcagaagcggcaagcggaccttctacaccggcggaggcctgatgaccttctacctgtggcagatcctgtacctgagcatgatcctgagcgcccgctcgagattaaaggtgttcttcgactggatcaagctggcctttttcaagagggacttcttcaagggcctgtga

SEQ ID NO: 207 - DNA, 1542 bp, Artificial Sequence
  source: /note="Description of Artificial Sequence: Synthetic polynucleotide"
atgctgtcgaagaacctgtatagcaacaagcggctgctgacctcgaccaacaccctagtgcgcttcgccagcaccagatccaccggcgtcgaaaacagcggggctggccccaccagcttcaagaccatgaaggtcatcgaccctcagcacagcgacaagcccaacgtgctgatcctgggctctggctggggcgccatcagctttctgaagcacatcgacaccaagaagtacaacgtcagcatcatcagccccagaagctacttcctgttcacccctctgctgcccagcgcccctgttggaaccgtggacgagaagtccatcatcgagcccatcgtgaacttcgccctgaagaaaaaggggaacgtcacctactacgaggccgaggccaccagcatcaaccccgaccggaacaccgtgaccatcaaaagcctgagcgccgtgtcccagctgtaccagcctgagaaccacctgggcctgcaccaggccgaacccgccgaaattaagtacgactacctgatcagcgccgtgggcgccgagcctaacacctttggaatccccggcgtgaccgactacggccacttcctggaggagattcccaacagcctggaaatccggcggaccttcgccgccaacctggaaaaggccaacctgctgcctaagggcgaccccgagcggagaagactgctgagcatcgtggtcgtgggcggaggccccacaggcgtggaagccgctggcgagctgcaggactacgttcaccaggacctgcggaagttcctgcctgccctggccgaggaagtgcagattcacttggtggaagccctgcccatcgtgctgaacatgttcgagaaggagctgagctcatacgcccagagccacctggaaaacacctccatcaaggtgcatctgagaaccgctgtggccaaggttgaagagaagcagctgctggccaagaccaagcacgaggacggcaagattaccgaggaaaccattccctacggcaccctgatttgggccaccggcaacaaggccagacccgtgatcaccgacctgttcaagaagatccccgagcagaacagcagcaagcggggcctggccgtgaacgacttcctgcaggtcaaaggcagcaacaacatcttcgccatcggcgacaacgcatttgccggcctgcctcctacagcccaggtggcccaccaggaagccgagtatctggccaagaacttcgataagatggcccagatccccaatttccagaagaacctgtcctcccggaaggataagatcgacctgctgttcgaggaaaacaacttcaagcccttcaagtacaacgacctgggcgccctggcctacctgggcagcgaaagagccattgccaccatcagaagcggcaagcggaccttctacaccggcggaggcctgatgaccttctacctgtggcggatcctgtacttgagcatgattctgagcgcccgcagcagactgaaggtgttcttcgactggatcaagctggccttcttcaagagggacttcttcaagggcctgtga

SEQ ID NO: 208 - DNA, 1542 bp, Artificial Sequence
  source: /note="Description of Artificial Sequence: Synthetic polynucleotide"
atgctgagcaagaacctgtacagcaacaagcggctgctgaccagcaccaacaccctcgtgcgcttcgccagcaccagatccaccggcgtcgaaaacagcggggctggccccaccagcttcaagaccatgaaggtcatcgaccctcagcacagcgacaagcccaacgtgctgatcctgggctctggctggggcgccatcagctttctgaagcacatcgacaccaagaagtacaacgtcagcatcatcagccccagaagctatttcctgttcacccccttgctgcccagcgcccctgtgggaaccgtggacgagaagtccatcatcgagcccatcgtgaacttcgccctgaagaaaaagggcaacgtcacctactatgaggccgaggccaccagcatcaaccccgaccggaacaccgtgaccatcaagagcctgagcgccgtgtcccagctgtaccagcccgagaaccatctgggcatgcaccaggccgagcccgctgagattaagtacgactacctgatcagcgccgtaggcgccgagcccaacacctttggtatccccggcgtgaccgactacggccacttcctggaggagatccccaacagcctggaaatccggcggacctttgccgccaacctggaaaaggccaacctgctgcctaagggcgaccccgaacggagaaggctactgagcatcgtggtcgttggcggaggccccacaggcgtggaagctgctggcgagctgcaggactacgtgcaccaggacctgcggaagttcctgcccgccctggccgaggaagtgcagattcacctggtggaagccctgcccatcgtgctgaacatgttcgagaaaaagctgagcagctacgcccagagccacctggaaaacacctccatcaaggtgcacctgagaaccgccgtggccaaggtggaagagaagcagctgctggccaagaccaagcacgaggacggcaagattaccgaggaaaccatcccctacggtaccctgatttgggccaccggcaacaaggcaagacccgtgatcaccgacctgttcaagaagatccccgagcaaaacagctccaagcggggcctggccgtgaacgacttcctgcaggtcaaaggcagcaacaacatcttcgccatcggcgacaacgcctttgccggcctgcctcctaccgcccaagtggcccaccaggaagccgagtacctggccaagaacttcgacaagatggcccagatccccaatttccagaagaacctgtcctcccggaaggataagatcgacctgttgttcgaggaaaacaacttcaagcccttcaagtacaacgacctgggcgccctggcctacctgggatccgaaagagccattgcaaccatcagatccggcaagcggaccttctacaccggcggaggcctgatgaccttctacctgtggcggatcctgtacctgagcatgatcctgagcgcccgctcgagattaaaggtgtttttcgactggatcaaactggccttcttcaagagggacttcttcaagggcttatga

SEQ ID NO: 209 - DNA, 1542 bp, Artificial Sequence
  source: /note="Description of Artificial Sequence: Synthetic polynucleotide"
atgctgagcaagaacttgtacagcaacaagcggttgctgaccagcaccaacaccctcgtgcgcttcgccagcaccagatccaccggcgtcgaaaacagcggggctggccccaccagcttcaagaccatgaaagtcatcgacccccagcacagcgacaagcccaacgtgctgatcctgggttctggctggggagccatcagctttctgaagcacatcgacaccaagaagtacaacgtcagcatcatcagccccagaagctacttcctgttcacccccctgatgcccagcgcccctgtggggaccgtggacgagaagtccatcattgagcccatcgtgaacttcgccctgaagaaaaagggcaacgtcacctactatgaggccgaagccaccagcatcaaccccgaccggaacaccgtgaccatcaagagcctgagcgccgtgtcccagctgtaccagcccgagaaccacctaggcatgcaccaggccgagcccgccgagattaagtacgactacctgatcagcgctgtgggcgccgaacccaacacctttggtatccccggcgtgaccgactacggccacttcctgaaagagatccccaacagcctggaaatccggcggaccttcgccgccaacctggaaaaggccaacctgctgcctaagggcgaccccgagcggagaaggctgctgagcatcgtggtggtgggcggaggccccacaggcgtggaagctgctggcgagctgcaggactacgtgcaccaggacctgcggaagttcctgcctgcactggccgaggaagtgcagattcacctggtggaagccctgcccatcgttctgaacatgttcgagaagaagctgagcagctacgcccagagccacctggaaaacacctccatcaaggtgcacctgagaaccgctgtggccaaggtggaagagaagcagctgctggccaagaccaagcacgaagacggcaaaattaccgaggaaaccatcccctacggcaccctgatttgggccaccggcaacaaggccagacccgtgatcaccgacctgttcaagaagatccccgagcaaaacagcagcaagcggggcctggccgtgaacgacttcctgcaggtcaaaggcagcaacaacatcttcgccatcggcgacaacgcctttgccggcctgcctcctacagcccaggtggcgcaccaggaagccgagtacctggccaagaacttcgacaagatggcccagatccccaatttccagaagaacctgtcctcccggaaggataagattgacctcctgttcgaggaaaacaacttcaagcccttcaagtacaacgacttaggcgccctggcctacctgggcagcgaaagggccattgccaccatcagaagcggcaagcggaccttctacaccggcggaggcctgatgaccttctacctgtggagaatcctgtacctgagcatgatcctgagcgccagaagcagactgaaggtgttcttcgactggatcaagctggccttcttcaagagggacttcttcaaaggcctgtga

SEQ ID NO: 210 - DNA, 1542 bp, Artificial Sequence
  source: /note="Description of Artificial Sequence: Synthetic polynucleotide"
atgctgagcaagaatctgtacagcaacaagcggctgctgacctcgaccaacaccctcgtgcgcttcgccagcaccagatccaccggcgtcgaaaacagcggggctggtcccaccagcttcaagaccatgaaggtcatcgaccctcagcacagcgacaagcccaacgtgctgatcctgggctctggctggggcgccatttcgtttctgaagcacatcgacaccaagaagtacaacgtcagcatcatcagccccagaagctacttcctgttcacccccctgctgcccagcgcacctgtgggaaccgtggacgagaagtcaatcatcgagcccatcgtgaacttcgccctgaagaaaaagggcaacgtcacctactacgaggccgaggccaccagcatcaaccccgaccggaataccgtgaccatcaaaaacctgagcgccgtgtcccagctgtaccagcccgagaaccacctgggcctgcaccaagccgagcccgccgagattaagtacgactacctgatcagcgccgtgggcgccgagcccaacacctttggaatccccggcgtgaccgactacggccatttcctgaaagagatccccaacagcctggaaatacggagaaccttcgccgccaacctggaagaggccaacctgctgcctaagggcgaccccgagcggagaaggctgctgagcattgtggtcgtgggcggtggccccactggcgtggaagctgctggcgagctgcaggattacgtgcaccaggacctgcggaagttcctgcccgcactggccgaggaagtgcagattcacctggtggaagccctgcccatcgtgctgaacatgttcgagaaaaagctgagcagctacgcccagagccacctggaaaacacctccatcaaggtgcacctgagaaccgccgtggccaaggtggaagagaagcagctgttggccaagaccaagcacgaggacggcaagattaccgaggaaaccatcccctacggcaccctgatttgggccaccggcaacaaggccagacccgtgatcaccgacctgttcaagaagatccccgagcagaacagcagcaagcggggcctggccgtgaacgacttcctgcaggtcaaaggcagcaacaacattttcgccattggcgacaacgcctttgccggcctgcctcctacagcccaggtggcccaccaggaagccgagtacctggccaagaacttcgacaagatggctcaaatccccaatttccagaagaacctgtcttcccggaaggataagatcgacctgctgttcgaggaaaacaacttcaagcccttcaagtacaacgacctgggcgccctggcctacctgggcagcgaaagagccattgccaccatcagaagcggcaagagaacattctacaccggcggaggcctgatgaccttctacctgtggcggatcctgtacctgagcatgatcctgagcgccagaagcagactgaaggtgttcttcgactggatcaagctggccttcttcaagagggacttcttcaagggcctgtga

SEQ ID NO: 211 - DNA, 1542 bp, Artificial Sequence
  source: /note="Description of Artificial Sequence: Synthetic polynucleotide"
atgctgagcaagaacctgtacagcaacaagcggctgctgaccagcaccaacaccctcgtgcgcttcgcctccaccagatccaccggcgtcgaaaacagcggggctggccccaccagcttcaagaccatgaaggtcatcgacccccagcacagcgacaagccaaacgtgctgatcctgggctctggctggggcgccatcagctttctgaagcacatcgacaccaagaagtacaacgttagcatcatcagccccagaagctacttcctgttcacccccctgctgcccagcgcccctgtggggaccgtggacgagaagtccatcatcgagcccatcgtgaacttcgctctgaagaaaaagggcaacgttacctactacgaggccgaggccaccagcatcaaccccgaccggaacaccgtgaccatcaagagcctgagcgccgtgtcccagctgtaccagcccgagaaccacctaggcctgcaccaggccgagcccgccgagattaagtacgactacctgatcagcgccgtgggcgccgagcccaacacctttggaatccccggcgtgaccgactacggccacttcctggaggagatccccaacagcctggaaatccggcggaccttcgccgccaacctggaaaaggccaacctgctgcctaagggcgaccccgagcggagaaggctgctgagcatcgtggtcgtgggcggagggcccacaggcgtggaagctgctggcgagctgcaggactacgtgcaccaggacctgcggaagttcctgcctgccctggccgaggaagtgcagattcacctggtggaagctctgcccatcgtgctgaacatgtttgagaagaagcttagcagctacgcccagtcacacctggaaaacacttccatcaaagtgcacctgagaaccgccgtggccaaggtggaagagaagcagctgctggccaagaccaagcacgaggacggtaagattaccgaggaaaccatcccatacggcaccctgatttgggccaccggcaacaaggccagacccgtgatcaccgacctgttcaagaaaatccccgagcagaacagcagcaagcggggcctggccgtgaacgacttcttgcaggtcaaaggcagcaacaacatcttcgccatcggcgacaacgcctttgctggcctgcctcctacagcccaggtggcccaccaggaggccgagtacatcgccaagaacttcgacaagatggcccagatccccaatttccagaagaacctgtcctcccggaaggataagattgacctgctgttcgaggaaaacaacttcaagcccttcaagtacaacgacctgggcgccctggcatacctgggcagcgaaagagccattgccaccatcagaagcggcaagagaaccttctacaccggcggaggcttaatgaccttctacctgtggcggatcctgtacttgagcatgattctgagcgcacgcagcagattaaaggtgttcttcgactggatcaagctggccttcttcaagagggacttcttcaagggcctgtga

SEQ ID NO: 212 - DNA, 1542 bp, Artificial Sequence
  source: /note="Description of Artificial Sequence: Synthetic polynucleotide"
atgctgagcaagaacctgtatagcaaccggcggctgctgaccagcaccaacaccctcgtgagattcgccagcaccagatccaccggcgtcgaaaacagcggggctggccccaccagcttcaagaccatgaaggtcatcgacccccagcacagcgacaagcccaacgtgctgatcctgggctctgggtggggcgccatcagctttctgaagcacatcgacaccaagaagtacaacgtcagcatcatctctcccagaaagtatttcctgttcacccccctgctgcccagcgcccctgtgggaaccgtggacgagaagtccatcatcgagcccatcgtgaacttcgccctgaagaaaaagggcaacgtcacctactacgaggccgaggccacctctatcaaccccgaccggaacaccgtgaccatcaagagcctgagcgccgtgagccagctgtaccagcccgagaaccacctgggcctgcaccaggccgagcccgccgagattaagtacgactacctgatcagcgccgtgggtgccgagcccaacacctttggaatccccggcgtgaccgactacggccacttcctgaaagagatccccaacagcctggaaatccggcggaccttcgccgccaacctggaaaaggccaacctgctgccaaagggcgaccccgagcggagaaggctgctgagcatcgtggtcgtgggcggaggccccacaggcgtggaagctgctggcgagctacaggactatgttcaccaggacctgcggaagttcctgcccgccctggccgaggaagtgcagattcacctggtggaagccctgcccatcgtgctgaatatgttcgagaagaagctgagcagctacgcccagagccacctggaaaacacctccatcaaggtgcacctgagaaccgccgtggccaaggtggaagagaagcagttgctggccaagaccaagcacgaggacggcaagattaccgaggaaaccatcccctacggcaccttgatttgggccaccggcaacaaggccagacccgtgatcaccgacctgttcaagaagatccccgagcagaacagcagcaagagaggcctggccgtgaacgacttcctgcaggtcaaaggcagcaacaacatcttcgccatcggcgacaacgcctttgccggcctgcctcctacagcccaggtggcccaccaagaagccgagtacctggccaagaactttgataagatggcccagatccccaatttccagaagaatctgtcctcccggaaggataagatcgacctgctgttcgaggagaacaactttaaacccttcaagtacaacgacctgggcgccctggcctacctgggcagcgaaagagccattgcaaccatcagaagcggtaagcggacattctacaccggcggaggcctgatgaccttctacctgtggcggatcttgtacctgagcatgatcctgtctgcccgcagcagactgaaggtcttcttcgactggatcaagctggccttcttcaagagggacttcttcaagggcctgtga

SEQ ID NO: 213 - DNA, 1542 bp, Artificial Sequence
  source: /note="Description of Artificial Sequence: Synthetic polynucleotide"
atgctgagcaagaacttgtacagcaacaagcggctgctgaccagcaccaatacgctagtgagattcgccagcaccagatccaccggcgtcgaaaacagcggggctggccccaccagcttcaagaccatgaaggtcatcgacccccagcacagcgacaagcccaacgtgctgatcctgggctctggctggggcgccattagctttctgaagcacatcgacaccaagaagtacaacgtcagcatcatcagccccagaagctatttcctgcacacccccctgctgcccagcgcccctgtggggaccgtggacgagaagtccatcatcgagcccatcgtgaatttcgccctcaagaaaaagggcaacgtcacctactacgaggccgaggccaccagcatcaaccccgaccggaacaccgtgaccatcaagagcctgagcgccgtgtcccagctgtaccagcccgagaaccacctgggcctgcaccaggccgaacccgccgagattaagtacgactacctgatcagtgccgtgggcgccgagcccaacacctttggaatccctggggtcaccgactacggccacttcctgaaagagatccccaacagcctggaaatccggcggaccttcgccgccaacctggaaaaggccaacctgctgcctaagggcgaccccgagcggagaaggctgctgagcatcgtggtcgtgggcggaggccccacaggcgtggaagctgctggcgagctgcaggactatgtgcaccaggacctgcggaagttcctgcccgccctggccgaggaagtgcaaattcacctggtggaagccctgcccatcgtgctgaatatgttcgagaaaaagctgagctcatacgcccagagccacctggaaaacacctccatcaaggtgcacctgagaaccgctgtggccaaggtggaagagaagcagctgctggccaagaccaagcacgaggacggcaagattaccgaggaaaccatcccctacggcaccctgatttgggccaccggcaacaaggccagacccgtgatcaccgacctgttcaagaagatccccgagcagaacagcagcaagcggggcctggcagtgaacgacttcctgcaggtcaaaggcagcaacaacatcttcgccatcggcgacaacgcctttgccggcttgcctcctacagcccaggtggcccaccaagaagccgaatacctggccaagaacttcgacaagatggcccagatccccaatttccagaagaacctgtcctcccggaaggataagatcgacctgctgttcgaggaaaacaacttcaagcccttcaagtacaacgacctgggtgccctggcctacctgggcagcgaaagagccattgccaccataagaagcggcaagcggaccttctacaccggcggaggcctgatgaccttctacctgtggcagatcctgtacctgagcatgatcctgagcgccagaagcagactgaaggtgttcttcgactggatcaagctggcattcttcaagagggacttcttcaagggcctgtga

SEQ ID NO: 214 - DNA, 1542 bp, Artificial Sequence
  source: /note="Description of Artificial Sequence: Synthetic polynucleotide"
atgctgtcgaagaacttgtacagcaaccggcggctgctgaccagcaccaacaccctcgtgcgcttcgccagcaccagatccaccggcgtcgaaaacagcggagctggccccacctcttttaagaccatgaaggtcatcgacccccagcacagcgacaagcccaacgtgctgatcctgggctctggctggggcgccatcagctttctgaagcacatcgacaccaagaagtacaacgtcagcatcatcagccccagaagctacttcctgcacacccccctgctgcccagcgcccctgtgggaaccgtggacgagaagtccatcatcgagcccatcgtgaacttcgccctgaagaaaaagggcaacgtcacctactacgaggccgaggccaccagcatcaaccccgaccggaacaccgtgaccatcaagagcctgagcgccgtgtcccagctgtaccagcctgagaaccacctgggcctgcatcaggccgagcccgccgagattaagtacgactacctgatcagtgccgtaggcgccgagcccaacacatttggaatccccggcgtgaccgactacggccacttcctgaaagagatccccaacagcctggaaatccggcggacctttgccgccaacctggaaaaggctaacctgttgcctaagggcgaccccgaacggagaaggctactgtccatcgtggtcgttggcggaggccccacaggcgtggaagctgctggcgagctgcaggactacgtgcaccaggacctgagaaagttcctgcccgccctggccgaggaagtgcagattcacctggtggaagccctgcccatcgtgctgaacatgttcgagaagaagctgagcagctacgcccagagccatctggaaaacacctccatcaaggtgcacctgagaaccgctgtggccaaggtggaagagaagcagctgctggccaagaccaagcacgaggacggcaagattaccgaggaaaccatcccctacggcaccctgatttgggccaccggcaacaaggccagacccgtgatcaccgacctgttcaagaagatccccgagcagaacagcagcaagcggggcctggccgtgaacgactttctgcaggtcaaaggcagcaacaacattttcgccatcggcgacaacgcctttgccggcctgcctcctacagcccaggtggcccaccaggaagccgagtacctggccaagaacttcgacaagatggcccagatacccaatttccagaagaacctgtcctcacggaaggataagatcgacctgctgttcgaggaaaacaacttcaagcccttcaagtacaacgacctgggcgccctggcctacctgggcagcgaaagagccattgccaccatcagaagcggcaagcggaccttttacaccggtggtggcctgatgaccttctacctgtggcggattctgtacctgagcatgatcctgagcgcccgcagcagactgaaggtgttcttcgactggatcaaactggccttcttcaagagggacttcttcaagggcctgtga

SEQ ID NO: 215 - DNA, 1542 bp, Artificial Sequence
  source: /note="Description of Artificial Sequence: Synthetic polynucleotide"
atgctgagcaagaacctgtacagcaacaagcggctgctgaccagcaccaacaccctcgtgcgcttcgccagcaccagatccaccggcgtcgaaaacagcggggctggccccaccagctttaagaccatgaaggtcatcgacccccagcacagcgacaagcccaacgtgctgatcctgggctctggctggggcgccatcagctttctgaagcacatcgacaccaagaagtacaacgtcagcatcatcagccctagaaagtacttcctgttcacccccctgctgcccagcgccccagtgggaaccgtggacgagaagtccatcatcgagcccatcgtgaactttgccctgaagaaaaagggcaacgtcacctactacgaggccgaggccaccagcatcaaccccgaccggaacaccgtgaccatcaaaagcctgagcgccgtttcccagctgtaccagcccgagaaccacctgggcctgcaccaggccgagcccgccgagattaagtacgactacctgatcagcgccgtgggcgccgagcctaacacctttggaatccccggcgtgactgactacggccacttcctgaaagagattcccaacagcctggaaatccggcggaccttcgccgccaacctggaaaaggccaacctgctgccaaagggcgatcccgagcggagaaggctgctgagcatcgtggtcgtgggcggaggccccacaggcgtggaagctgctggcgagctgcaggactacgtgcaccaggacctgcggaagttcctgcccgcactggccgaggaagtgcagattcacctggtggaagccctgcccatcgtgctgaacatgttcgagaaggagctgagctcatacgcccagagccacctggaaaacacctcgatcaaggtgcacctgagaaccgctgtggccaaagtggaagagaagcagctgctggcaaagaccaagcacgaggacggcaagattaccgaggaaaccatcccctacggcaccctgatttgggccaccggcaacaaggccagacccgtgatcaccgacctgttcaagaagatccccgagcagaacagcagcaagcggggcttggccgtgaacgacttcctgcaggtgaaaggcagcaacaacatcttcgccatcggcgacaacgcctttgccggcctgcctcctacagcccaggtggcgcaccaggaagccgaatacctggccaagaactttgacaagatggcccagatccccaatttccaaaagaacctgtcctcccggaaggataagatcgacctgctgttcgaggaaaacaacttcaagcccttcaagtacaacgacctgggcgccctggcatacctgggcagcgaaagagccattgccaccatcagaagcggcaagcggaccttttacaccggcggaggcctgatgaccttctacctgtggcggatcttgtacctgagcatgatcctgagcgcacgcagcagactgaaggtgttcttcgactggattaagctggccttcttcaagagggacttctttaagggcctgtga

SEQ ID NO: 216 - DNA, 1542 bp, Artificial Sequence
  source: /note="Description of Artificial Sequence: Synthetic polynucleotide"
atgctgagcaagaacctgtacagcaacaagcggctgctgaccagcaccaacaccctcgtgcgcttcgccagcaccagatccaccggcgtcgaaaacagcggggctggtcccaccagcttcaagaccatgaaggtcatcgacccccagcacagcgacaaacccaacgtgctgatcctgggctctggctggggcgccattagctttctgaagcacatcgacaccaagaagtacaacgtcagcatcatcagccccagaagctacttcctgcacacccctctgctgcccagcgccccagtgggaaccgtggacgagaagtccatcatcgagcccatcgtgaacttcgccctgaagaaaaagggcaacgtcacctactacgaggccgaggccaccagcatcaaccccgaccggaacaccgtgaccatcaagagcctgagcgccgtgtcccagctgtaccagcccgaaaaccacctgggcctgcaccaggccgagcccgccgagattaagtacgactacctgatcagcgccgtgggcgccgagcccaacacctttggaatccccggcgtgaccgactacggccacttcctggaggagatccccaacagcctggaaatccggcggacctttgccgccaacctagaaaaggccaacctgctgcctaagggcgaccccgagcggagaaggctgctgagcatcgtggtcgtgggcggaggccccacaggcgtggaagccgctggtgagctgcaggactacgtgcaccaggacctgcggaagtttctgcccgccctggccgaggaagtccagattcacctggtggaagccctgcccatcgtgctgaatatgttcgagaagaagctgagcagctacgcgcagagccacctggaaaacacctccatcaaggtgcatctgagaaccgccgtggccaaggtggaagagaagcaactgctggccaagaccaagcacgaggacggcaagattaccgaggaaaccatcccctacggcaccctgatttgggccacgggcaacaaggccagacccgtgatcaccgacctgttcaagaagatccccgagcagaacagcagcaagcggggcttggccgtgaacgacttcctgcaggtgaaaggcagcaacaacattttcgccatcggcgacaacgcctttgccggcctgcctcctaccgcccaggtggcccaccaggaagccgagtacctggccaagaacttcgacaagatggcccagatccccaatttccagaagaacctgtcctcccggaaggataagattgacctgctgttcgaggaaaacaacttcaagcccttcaagtacaacgacctgggtgccctggcctacctgggcagcgaaagagccattgcaaccatcagaagcggcaagcggaccttctacaccggcggaggcctgatgaccttctacctgtggcggatcctgtacctgtccatgatcctgagcgcccgcagcagactgaaggtgttcttcgactggatcaagctggcatttttcaaaagagacttcttcaagggcctgtga

SEQ ID NO: 217 - DNA, 1542 bp, Artificial Sequence
  source: /note="Description of Artificial Sequence: Synthetic polynucleotide"
atgctgagcaagaacctgtacagcaacaagcggctgctgaccagcaccaacacgctcgtgcgcttcgcctccaccagatccaccggcgtcgaaaacagcggagctggccccaccagcttcaagaccatgaaggtcatcgacccccagcacagcgacaagcccaacgtgctgatcctgggctcgggctggggcgccatcagctttctgaagcacatcgacaccaagaagtacaacgtcagcatcatcagccccagaaagtatttcctgttcacccccctgctgcccagcgcccctgtgggaaccgtggacgagaagtccatcatcgagcccatcgtgaatttcgccctgaagaaaaagggcaacgtcacctactacgaggccgaggccaccagcatcaaccccgaccggaacaccgtgaccatcaagagcctgagcgccgtgtcccagctgtaccagcccgagaaccacctgggcctgcaccaggccgaacccgccgagattaagtacgactacctgatcagcgccgtgggcgccgagcccaacacatttggaatccctggcgtgaccgactacggccacttcctgaaagagatccccaacagcctggaaatccggagaaccttcgccgccaacctggaaaaggccaacctgctgcctaagggcgaccccgaacggagaaggctgctgagcatcgtggtcgtgggcggaggccccacaggcgtggaagctgctggcgagctgcaggactacgtgcaccaggacctgcggaagttcttccctgccctggccgaagaagtgcagattcacctggtcgaagccctgcccatcgtgctgaacatgtttgagaaaaagctgagcagctacgcccagagccatctggaaaacacctccatcaaggtacacctgagaaccgccgtggccaaggttgaagagaagcagctgctggccaagaccaagcacgaggacggcaagattaccgaagaaaccatcccctacggtaccctgatttgggccaccggtaacaaggccagacccgtgatcaccgacctgttcaagaagatccctgagcagaacagcagcaagcggggcctggccgtgaacgacttcctgcaggtcaaaggcagcaacaacatcttcgccatcggcgacaacgcctttgccggcctgcctcctacagcccaggtggcccaccaggaagccgagtatctggccaagaacttcgacaagatggcccagatccccaatttccaaaagaacctgtcctcccggaaggataagatcgacctgctgttcgaggaaaacaacttcaagcctttcaagtacaacgatctgggcgccctggcctacctgggcagcgaaagagccattgccaccatcagaagcggcaagcggaccttctacaccggcggaggcctgatgaccttctacctgtggcggatcctgtacctgagcatgatcctaagcgcccgcagcagactgaaggtgttcttcgactggattaagctggccttcttcaagagggacttcttcaagggcctgtga

SEQ ID NO: 218 - DNA, 1542 bp, Artificial Sequence
  source: /note="Description of Artificial Sequence: Synthetic polynucleotide"
atgctgagcaagaacctgtacagcaacaagcggctgctgacctcgacgaacaccatggtgcgcttcgccagcaccagatccaccggcgtcgaaaacagcggagctggccctaccagcttcaagaccatgaaggtcatcgacccccagcacagcgacaagcccaacgtgctgatactgggctctggctggggcgccatcagctttctgaagcacatcgacaccaagaagtacaacgtcagcatcatcagccccagaagctatttcctgttcacccccctgctgcccagcgcccctgtgggaacagtggacgagaagtccatcatcgagcccatcgtgaactttgccctgaagaaaaagggcaacgtcacctactacgaggccgaggccaccagcatcaaccccgaccggaacaccgtgaccatcaagagcctgagcgccgtgtcccagctgtaccagcccgagaaccacctgggcctgcaccaggccgagcccgccgagattaagtacgactacctgatcagcgccgtaggcgccgagcccaacacctttggaatccctggggtcaccgactacggccacttcctgaaagagatccccaacagcctggaaatccggcggaccttcgccgccaacctggaaaaggccaacctgctgcctaagggcgaccccgaacggagaagactgctgagcatcgtggtcgtgggcggaggccccacaggtgtggaagctgctggcgagctgcaggactacgtgcaccaggacctgcggaagttcctgcccgccctggccgaggaagtgcagattcacctggtggaagccctgcccatcgtgctgaatatgttcgagaagaagctgagcagctacgcccagagccacctggaaaacacctccatcaaggtgcacctgagaaccgccgtggccaaggtggaagagaagcagctgctggccaagaccaagcacgaagacggcaagattaccgaggaaactatcccatacggcaccctgatttgggccaccggcaacaaggccagacccgtgatcaccgacctgttcaagaagatccccgagcagaacagcagcaagagaggcctggccgtgaacgacttcctgcaggtgaaaggcagcaacaacatcttcgccatcggcgacaacgcctttgccgggctgcctcctacagcccaggtggcccaccaggaagccgagtacctggccaagaacttcgacaagatggcccaaatccccaatttccagaagaacctgtcctccagaaaggataagatcgacctgctgttcgaggagaacaacttcaagcccttcaagtacaacgacctgggcgccctggcctacctgggcagcgaaagagccattgccaccatcagaagcggtaagcggaccttctacaccggcggaggcctgatgaccttctacctgtggcggatcctgtacatgagcatgatcctgagcgcccgcagcagattaaaggtgttcttcgactggatcaagctggcctttttcaagagggacttcttcaagggcctgtag

SEQ ID NO: 219 - DNA, 1542 bp, Artificial Sequence
  source: /note="Description of Artificial Sequence: Synthetic polynucleotide"
atgctgagcaagaacctgtacagcaacaagcggctgctgaccagcaccaacaccctcgtgcgcttcgcctccaccagatccaccggcgtcgaaaacagcggggctggccccaccagcttcaagaccatgaaggtcatcgacccccagcacagcgacaagcccaacgtgctgatactgggctctggctggggcgccatcagctttctgaagcacatcgacaccaagaagtacaacgtcagcatcatcagccccagaagctatttcctgttcacccccctgctgcccagcgcccctgttggaaccgtggacgagaagtccatcatcgagcccatcgtgaacttcgccctgaagaaaaagggcaacgtcacctactacgaggccgaggccaccagcatcaaccccgaccggaacaccgtgaccatcaagagcctgtctgccgtgtcccagctgtaccagcccgagaaccacctgggcatgcaccaggccgagcccgccgagattaagtacgactacctgatcagcgccgtgggcgcggagcccaacacctttggaattcctggcgtgaccgactacggccacttcctgaaagagatccccaacagcctggaaatccggcggaccttcgccgccaatctggaaaaggctaacctgctgccaaagggcgaccccgagcggagaaggctgctgagcatcgtggtcgtgggcggaggccccacaggcgtggaagctgctggcgagctgcaggactacgtgcaccaggacctgcggaagttcctgcctgccctggccgaggaagtgcagattcacctggtggaagccctgcccatcgtgctgaacatgttcgagaagaagctgagcagctacgcccagagccacctggaaaacacctccatcaaggtgcacctgagaaccgccgtcgccaaggtggaagagaagcagctgctggccaagaccaagcacgaggacggcaagattaccgaggaaaccatcccctacggcaccctgatttgggccaccggcaacaaggccagacccgtgatcaccgacctgttcaagaaaatccccgagcagaacagcagcaagcggggcctggccgtgaacgacttcctgcaggtcaaaggcagcaacaacatcttcgccatcggtgacaacgcctttagcggcttgccacctacagcccaggtggcccaccaggaagccgaatacctggccaagaacttcgacaagatggcccagatacccaatttccaaaagaacctgtcctcccggaaggataagatcgacctgctgttcgaggaaaacaacttcaagcccttcaaatacaacgacctgggcgccctggcctacctgggcagcgaaagggccattgccaccatcagaagcggcaagagaaccttctacaccggcggaggcctgatgaccttctacctgtggcggattttgtacctgtccatgatcctgagcgcccgctcgagattaaaggtgttcttcgactggatcaagctggccttcttcaagagagacttcttcaagggcctgtga

SEQ ID NO: 220 - DNA, 1542 bp, Artificial Sequence
  source: /note="Description of Artificial Sequence: Synthetic polynucleotide"
atgctgagcaagaacctgtatagcaacaagaggctgctgaccagcaccaacaccctcgtgcgcttcgccagcaccagatccaccggcgtcgaaaacagcggggctggccccaccagcttcaagaccatgaaggtcatcgacccccagcacagcgacaagcccaacgtgctgatactgggctctggctggggcgccatcagctttctgaagcacatcgacaccaagaagtacaacgtcagcatcatcagccccagaagctacttcttattcacccccctgctgcccagcgcacctgtgggaaccgtggacgagaagtccatcatcgagcccatcgtgaacttcgccctgaagaaaaagggcaacgtcacctactacgaggccgaggccaccagcatcaaccccgaccggaacaccgtgaccatcaagagcctgagcgccgtgtcccagctgtaccagcccgagaaccacctaggcctgcaccaagccgaacccgccgaaattaagtacgactatctgatcagcgccgtgggcgccgagcctaacacctttggaatccccggcgtgaccgactacggccacttcttcaaagagatccccaacagcctggaaatccggagaaccttcgccgccaacctggaaaaggccaacctgctgcctaagggcgaccccgagcggagaaggctgctgagcatcgtggtcgtgggcggtggccccacaggcgtggaagctgctggcgagctgcaggactacgtgcaccaggacctgcggaagttcctgcctgccctggccgaggaagtgcagattcacctggtggaagctctgcccatcgtgctgaacatgttcgagaagaagctgagcagctacgcccagagccatctggaaaacacctccatcaaggtgcacctgagaaccgccgtggccaaggtggaagaaaagcagctgctggccaagaccaagcacgaggacggcaagattaccgaggaaaccatcccctacggcaccctgatttgggccaccggcaacaaggccagacccgtgatcaccgacctgttcaagaagatccccgagcagaacagcagcaagcggggcctggccgtgaacgacttcctgcaggtcaaaggcagcaacaacatcttcgccatcggcgacaacgcatttgccggcctgccacctacagcccaggtggcccaccaggaggccgagtacctggccaagaacttcgataagatggctcagatccccaatttccagaagaatctgtcctcccggaaggataagatcgatctgctgttcgaggaaaacaacttcaagcccttcaagtacaacgacctgggcgccctggcctacctgggcagcgaaagagccattgccaccatcagaagcggcaagcggaccttctacaccggcggaggcctgatgaccttctacctgtggcggatcctgtacctgtccatgatcctgagcgccagatcgagactgaaggtgttcttcgactggatcaaaatggcctttttcaagagggacttcttcaagggcctgtga

SEQ ID NO: 221 - DNA, 1542 bp, Artificial Sequence
  source: /note="Description of Artificial Sequence: Synthetic polynucleotide"
atgctgagcaagaacctgtacagcaacaagcggctgctgaccagcaccaacaccctcgtgcgcttcgccagcaccagatccaccggcgtcgaaaacagcggggctggccccaccagcttcaagaccatgaaagtcatcgacccccagcacagcgacaagcccaacgtgctgatcctgggttcgggctggggcgccatctcgtttctgaagcacatcgacaccaagaagtacaacgtcagcatcatcagccccagaagctacttcctgttcacccccctgctgcccagcgcccctgttgggaccgtggacgagaagtccatcattgagcccatcgtgaacttcgccctgaagaaaaagggcaacgtcacctactatgaggccgaggccaccagcatcaaccccgaccggaacaccgtgaccatcaaaaacctgagcgccgtgtcccagctgtaccaacccgagaaccacctgggcctgcaccaggccgagcccgccgagattaagtacgactacctgatcagcgccgtgggcgccgagcccaacacctttggaatccccggcgtgaccgactacggtcacttcctgaaagagatccccaacagcctggaaatccggcggaccttcgccgccaacctggaaaaggccaacctgctgcctaagggtgaccccgagcggagaaggctgctgagcatcgtggtcgtgggcggaggccccacaggcgtggaagctgctggtgagctgcaggactacgtgcaccaggacctgcggaagttcctgcccgcactggccgaggaagtgcaaattcacctggtggaagccctgcccatcgttctgaatatgttcgagaagaagctgagcagctacgcccagagccacctggaaaacacctccatcaaggtgcacctgagaaccgccgtggccaaggttgaagagaagcagctgctggccaagaccaaacacgaggacggcaaaattaccgaggaaaccatcccctacggcaccctgatttgggccaccggcaacaaggccagacccgtgatcaccgacctgttcaagaagatccctgagcagaacagcagcaagcggggcctggccgtgaacgacttcctgcaggtcaaaggcagcaacaacatcttcgccatcggcgacaacgcctttgccggcctgcctccaacagcccaggtggcccaccaggaagccgagtacctggccaagaacttcgacaagatggcccagatccccaatttccagaagaacctgtcttccagaaaggataagattgacctgctgttcgaggaaaacaacttcaagcccttcaagtacaacgacctgggcgccctggcctacctgggcagcgaaagggccattgcaaccatcagaagcggcaagcggaccttctacaccggcggaggcctgatgaccttctacctgtggcggatcctgtacctgagcatgattctgagcgcccgcagcagactgaaggtgtttttcgactggatcaagatggccttcttcaagagggacttcttcaagggcctgtga

SEQ ID NO: 222 - DNA, 1542 bp, Artificial Sequence
  source: /note="Description of Artificial Sequence: Synthetic polynucleotide"
atgctgagcaagaacctgtacagcaaccggcggctgctgaccagcacgaacaccctcgtgcgcttcgcctccaccagatccacaggcgtcgaaaacagcggggctggccccaccagcttcaagaccatgaaggtcatcgacccccagcacagcgacaagcccaacgtgctgatcctgggctctggctggggcgccatcagctttctgaagcacatcgacaccaagaagtacaacgtcagcatcatcagccccagaagctacttcctgttcacccccttgctgccctctgcccctgtgggaaccgtggacgagaagtccattatcgagcccatcgtgaacttcgccctgaagaaaaagggcaacgtcacctactatgaggccgaggccaccagcatcaaccccgaccggaacaccgtgaccatcaaaaacctgagcgccgtgtcccagctgtaccagcccgagaaccacctaggcctgcaccaagccgaacccgccgagattaagtacgactacctgatcagcgccgtgggcgccgagcccaacacctttggaatccccggcgtgaccgactacggccacttcctgaaagagatccccaacagcctggaaatcagacggactttcgccgccaacctggaaaaggccaacctgctgcctaagggcgaccccgagcggagaagactgctgagcattgtcgtcgtgggcggagggcccacaggcgtggaagctgctggcgagctgcaggactacgttcaccaggacctgcggaagttcctgcccgcactggccgaggaagtgcagattcacctggtggaagccctgcccatcgtgctgaacatgttcgagaagaagctgagcagctacgcccagagccacttagaaaacacctccatcaaggtgcatctgagaaccgccgtggccaaggtggaagagaagcagctgctggccaagaccaagcacgaggacggcaagattaccgaggaaaccatcccctacggtaccttgatttgggccaccggcaacaaggccagacccgtgatcaccgacctgttcaagaagatccccgagcaaaactcgagcaagcggggcctggccgtgaacgacttcctgcaggtcaaaggcagcaacaacatcttcgccatcggcgacaacgcatttgccggcctgcctcctacagcccaggtggcccaccaggaagccgagtacctggccaagaacttcgacaagatggcccagatccccaatttccagaagaacctgtcttcccggaaggataagatcgacctgctgttcgaggaaaacaacttcaagcccttcaagtacaacgacctgggcgccctggcctacctgggcagcgaaagagccattgccaccatcagatccggcaagcggaccttctacaccggcggaggcctgatgaccttctacctgtggcggatcctgtacctgagcatgatcctgagcgcccgcagcagactgaaggtgttcttcgactggatcaagctggcattcttcaagagggacttcttcaagggcctgtga

SEQ ID NO: 223 - DNA, 1542 bp, Artificial Sequence
  source: /note="Description of Artificial Sequence: Synthetic polynucleotide"
atgctgagcaagaacctgtacagcaacaagaggctgctgaccagcaccaacaccatggtgcgcttcgccagcaccagatccaccggcgtcgaaaactccggggctggccccacaagcttcaagaccatgaaggtcatcgacccccagcacagcgacaagccaaacgtgctgatcctgggctctggctggggcgccatcagctttctgaagcacatcgacaccaagaagtacaacgtcagcatcatcagccccagaagctacttcctgttcacccccctgatgcccagcgcccctgtgggaaccgtggacgagaagtccatcattgagcccatcgtgaatttcgccctgaagaaaaaggggaacgtcacctactacgaggccgaggccaccagcatcaaccccgaccggaacaccgtgaccatcaaaagcctgagcgccgtgtcccagctgtaccagcccgagaaccacctgggcctgcaccaagccgagcccgctgagattaagtacgactacctgatcagcgccgtgggcgccgagcccaacacctttggaatccccggcgtgaccgactacggccacttcctgaaagagatccccaacagcctggaaatccggcggacctttgccgccaatctggagaaggccaacctgctgcctaagggcgatcccgagcggagaaggctgctgagcatcgtggtcgtgggcggaggccccacaggtgtggaagctgctggcgaactgcaggactacgtgcaccaggacctgcggaagttcctgcccgccctggccgaggaagtgcagattcacctggtggaagccctgcccatcgtgctgaacatgtttgagaagaagctgagcagctacgcccagagccacctggaaaacacctccatcaaggtgcacctgagaaccgccgtggccaaggtggaagagaagcagctgctggccaagaccaagcacgaggacggtaagattaccgaggaaaccatcccctacggcaccctgatttgggccaccggcaacaaggccagacccgtgatcaccgacctgttcaagaagatccccgagcagaactcgagcaagcggggcctggccgtgaacgacttcctgcaggtgaaaggcagcaacaacattttcgccattggcgacaacgcctttgccggcctgcctcctacagcccaggtggcccaccaggaagccgagtacctggccaagaatttcgacaagatggcccaaatccccaatttccagaagaacctgtcctcccggaaggataagatcgatctgctgttcgaggaaaacaacttcaagcccttcaagtacaacgacctgggcgccctggcctacctgggcagcgaaagagccattgccaccatcagatccggcaagcggaccttctacaccggcggaggcttaatgaccttctacttatggcggatcctgtacctgagcatgatcctgagcgcccgcagcagactgaaggtgttcttcgactggatcaagctggccttcttcaagagagacttcttcaagggcctgtga

SEQ ID NO: 224 - DNA, 1542 bp, Artificial Sequence
  source: /note="Description of Artificial Sequence: Synthetic polynucleotide"
atgctgagcaagaacctgtacagcaacaagcggctgctgaccagcaccaacaccctcgtgcgcttcgccagcaccagatccaccggcgtcgaaaacagcggggctggccccaccagcttcaagaccatgaaggtcatcgacccccagcacagcgacaagcccaacgtgctgatcctgggctctggctggggcgccattagctttctgaagcacatcgacaccaagaagtacaacgtcagcatcatcagccccagaagctacttcctgttcacccccctgctgcccagcgcccctgtgggaaccgtagacgagaagtccatcatcgagcccatcgtgaacttcgccctgaagaaaaagggcaacgtcacctactacgaggccgaggccacctctatcaaccccgacaggaacaccgtgaccatcaagagcctgtctgccgtgtcccagctgtaccagcccgagaaccatctgggcctgcaccaagccgagcccgccgagattaagtacgactacctgatcagcgccgtgggcgccgagcccaacacctttggaatccccggggtcaccgactacggccacttcttcaaggagatccccaacagcctggaaatccggcggaccttcgccgccaacctagaaaaggccaacctgctgcctaagggcgaccccgagcggagaaggctgctgagcatcgtcgtcgttggcggaggccccacaggcgtggaagctgctggcgagctgcaggactacgtgcaccaggacctgcggaagttcctgcccgccctggccgaggaagtgcagattcacctggtggaagccctgcccatcgtgctgaacatgttcgagaagaagctgagcagctacgcccagtcacatctggaaaacacctcgatcaaggtgcatctgagaaccgccgtggccaaggtggaagagaagcagctgctggccaagaccaagcacgaggacggcaagattaccgaggaaaccatcccctacggcaccctgatttgggccaccggcaacaaggccagacccgtgatcaccgacctgttcaagaagatccccgagcaaaacagcagcaagcggggcttggccgtgaacgacttcttgcaggtcaaaggcagcaacaacatcttcgccatcggcgacaatgcctttgccggcctgcctcctacagcccaggtggcgcaccaggaagccgagtacctggccaagaacttcgacaaaatggcccagatccccaatttccagaagaacctgtcctcccggaaggataagatcgacctgctgttcgaggagaacaacttcaagcccttcaagtacaacgacctgggcgccctggcctacctgggaagcgaaagagccattgccaccatcagaagcggcaagcggaccttctacaccggcggaggcctgatgaccttctacctgtggcggatcttgtacatgagcatgatcctgagcgcccgcagcagactgaaggtcttcttcgactggatcaagttagccttcttcaagagggacttcttcaagggcttatga

SEQ ID NO: 225 - DNA, 1542 bp, Artificial Sequence
  source: /note="Description of Artificial Sequence: Synthetic polynucleotide"
atgctgagcaagaacctgtacagcaacaagcggctgctgaccagcaccaacaccctcgtgcgcttcgccagcaccagatccaccggcgtcgaaaacagcggggctggccccaccagcttcaagaccatgaaggtcatcgacccccagcacagcgacaagcccaacgtgctgatcctgggctctggctggggcgccatcagctttctgaagcacatcgacaccaagaagtacaacgtcagcatcatcagccccagaagctacttcctgttcacccccctgctgcccagcgcccctgtgggaaccgtggacgagaagtccatcatcgagcccatcgtgaacttcgccctgaagaaaaagggcaacgtcacctactacgaggccgaggccaccagcatcaaccccgaccggaacaccgtgaccatcaagagcctgagcgccgtgtcccagctgtaccagcccgagaaccacctgggcctgcaccaggccgagcccgccgagattaagtacgactacctgatcagcgccgtgggcgccgagcccaacacctttggaatccccggcgtgaccgactacggccacttcttcgaggagatccccaacagcctggaaatccggcggaccttcgccgccaacctggaaaaggccaacctgctgcctaagggcgaccccgagcggagaaggctgctgagcatcgtggtcgtgggcggaggccccacaggcgtggaagctgctggcgagctgcaggactacgtgcaccaggacctgcggaagttcctgcccgccctggccgaggaagtgcagattcacctggtggaagccctgcccatcgtgctgaacatgttcgagaagaagctgagcagctacgcccagagccacctggaaaacacctccatcaaggtgcacctgagaaccgccgtggccaaggtggaagagaagcagctgctggccaagaccaagcacgaggacggcaagattaccgaggaaaccatcccctacggcaccctgatttgggccaccggcaacaaggccagacccgtgatcaccgacctgttcaagaagatccccgagcagaacagcagcaagcggggcctggccgtgaacgacttcctgcaggtcaaaggcagcaacaacatcttcgccatcggcgacaacgcctttgccggcctgcctcctacagcccaggtggcccaccaggaagccgagtacctggccaagaacttcgacaagatggcccagatccccaatttccagaagaacctgtcctcccggaaggataagatcgacctgctgttcgaggaaaacaacttcaagcccttcaagtacaacgacctgggcgccctggcctacctgggcagcgaaagagccattgccaccatcagaagcggcaagcggaccttctacaccggcggaggcctgatgaccttctacctgtggcggatcctgtacctgagcatgatcctgagcgcccgcagcagactgaaggtgttcttcgactggatcaagctggccttcttcaagagggacttcttcaagggcctgtga

SEQ ID NO: 226 - DNA, 1542 bp, Artificial Sequence
  source: /note="Description of Artificial Sequence: Synthetic polynucleotide"
atgctgagcaagaacctgtacagcaacaagcggctgctgaccagcaccaacaccctcgtgcgcttcgccagcaccagatccaccggcgtcgaaaacagcggggctggccccaccagcttcaagaccatgaaggtcatcgacccccagcacagcgacaagcccaacgtgctgatcctgggctctggctggggcgccatcagctttctgaagcacatcgacaccaagaagtacaacgtcagcatcatcagccccagaagctacttcctgttcacccccctgctgcccagcgcccctgtgggaaccgtggacgagaagtccatcatcgagcccatcgtgaacttcgccctgaagaaaaagggcaacgtcacctactacgaggccgaggccaccagcatcaaccccgaccggaacaccgtgaccatcaagagcctgagcgccgtgtcccagctgtaccagcccgagaaccacctgggcctgcaccaggccgagcccgccgagattaagtacgactacctgatcagcgccgtgggcgccgagcccaacacctttggaatccccggcgtgaccgactacggccacttcctgaaagagatccccaacagcctggaaatccggcggaccttcgccgccaacctggaagaggccaacctgctgcctaagggcgaccccgagcggagaaggctgctgagcatcgtggtcgtgggcggaggccccacaggcgtggaagctgctggcgagctgcaggactacgtgcaccaggacctgcggaagttcctgcccgccctggccgaggaagtgcagattcacctggtggaagccctgcccatcgtgctgaacatgttcgagaagaagctgagcagctacgcccagagccacctggaaaacacctccatcaaggtgcacctgagaaccgccgtggccaaggtggaagagaagcagctgctggccaagaccaagcacgaggacggcaagattaccgaggaaaccatcccctacggcaccctgatttgggccaccggcaacaaggccagacccgtgatcaccgacctgttcaagaagatccccgagcagaacagcagcaagcggggcctggccgtgaacgacttcctgcaggtcaaaggcagcaacaacatcttcgccatcggcgacaacgcctttgccggcctgcctcctacagcccaggtggcccaccaggaagccgagtacctggccaagaacttcgacaagatggcccagatccccaatttccagaagaacctgtcctcccggaaggataagatcgacctgctgttcgaggaaaacaacttcaagcccttcaagtacaacgacctgggcgccctggcctacctgggcagcgaaagagccattgccaccatcagaagcggcaagcggaccttctacaccggcggaggcctgatgaccttctacctgtggcggatcctgtacctgagcatgatcctgagcgcccgcagcagactgaaggtgttcttcgactggatcaagctggccttcttcaagagggacttcttcgagggcctgtga

SEQ ID NO: 227 - DNA, 1542 bp, Artificial Sequence
  source: /note="Description of Artificial Sequence: Synthetic polynucleotide"
atgctgagcaagaacctgtacagcaacaagcggctgctgaccagcaccaacaccctcgtgcgcttcgccagcaccagatccaccggcgtcgaaaacagcggggctggccccaccagcttcaagaccatgaaggtcatcgacccccagcacagcgacaagcccaacgtgctgatcctgggctctggctggggcgccatcagctttctgaagcacatcgacaccaagaagtacaacgtcagcatcatcagccccagaaagtacttcctgttcacccccctgctgcccagcgcccctgtgggaaccgtggacgagaagtccatcatcgagcccatcgtgaacttcgccctgaagaaaaagggcaacgtcacctactacgaggccgaggccaccagcatcaaccccgaccggaacaccgtgaccatcaagagcctgagcgccgtgtcccagctgtaccagcccgagaaccacctgggcctgcaccaggccgagcccgccgagattaagtacgactacctgatcagcgccgtgggcgccgagcccaacacctttggaatccccggcgtgaccgactacggccacttcctgaaagagatccccaacagcctggaaatccggcggaccttcgccgccaacctggaaaaggccaacctgctgcctaagggcgaccccgagcggagaaggctgctgagcatcgtggtcgtgggcggaggccccacaggcgtggaagctgctggcgagctgcaggactacgtgcaccaggacctgcggaagttcctgcccgccctggccgaggaagtgcagattcacctggtggaagccctgcccatcgtgctgaacatgttcgagaagaagctgagcagctacgcccagagccacctggaaaacacctccatcaaggtgcacctgagaaccgccgtggccaaggtggaagagaagcagctgctggccaagaccaagcacgaggacggcaagattaccgaggaaaccatcccctacggcaccctgatttgggccaccggcaacaaggccagacccgtgatcaccgacctgttcaagaagatccccgagcagaacagcagcaagcggggcctggccgtgaacgacttcctgcaggtcaaaggcagcaacaacatcttcgccatcggcgacaacgcctttgccggcctgcctcctacagcccaggtggcccaccaggaagccgagtacctggccaagaacttcgacaagatggcccagatccccaatttccagaagaacctgtcctcccggaaggataagatcgacctgctgttcgaggaaaacaacttcaagcccttcaagtacaacgacctgggcgccctggcctacctgggcagcgaaagagccattgccaccatcagaagcggcaagcggaccttctacaccggcggaggcctgatgaccttctacctgtggcggatcctgtacctgagcatgatcctgagcgcccgcagcagactgaaggtgttcttcgactggatcaagatggccttcttcaagagggacttcttcaagggcctgtga

SEQ ID NO: 228 - DNA, 1542 bp, Artificial Sequence
  source: /note="Description of Artificial Sequence: Synthetic polynucleotide"
atgctgagcaagaacctgtacagcaacaagcggctgctgaccagcaccaacaccctcgtgcgcttcgccagcaccagatccaccggcgtcgaaaacagcggggctggccccaccagcttcaagaccatgaaggtcatcgacccccagcacagcgacaagcccaacgtgctgatcctgggctctggctggggcgccatcagctttctgaagcacatcgacaccaagaagtacaacgtcagcatcatcagccccagaagctacttcctgttcacccccctgatgcccagcgcccctgtgggaaccgtggacgagaagtccatcatcgagcccatcgtgaacttcgccctgaagaaaaagggcaacgtcacctactacgaggccgaggccaccagcatcaaccccgaccggaacaccgtgaccatcaagagcctgagcgccgtgtcccagctgtaccagcccgagaaccacctgggcctgcaccaggccgagcccgccgagattaagtacgactacctgatcagcgccgtgggcgccgagcccaacacctttggaatccccggcgtgaccgactacggccacttcctgaaagagatccccaacagcctggaaatccggcggaccttcgccgccaacctggaagaggccaacctgctgcctaagggcgaccccgagcggagaaggctgctgagcatcgtggtcgtgggcggaggccccacaggcgtggaagctgctggcgagctgcaggactacgtgcaccaggacctgcggaagttcctgcccgccctggccgaggaagtgcagattcacctggtggaagccctgcccatcgtgctgaacatgttcgagaagaagctgagcagctacgcccagagccacctggaaaacacctccatcaaggtgcacctgagaaccgccgtggccaaggtggaagagaagcagctgctggccaagaccaagcacgaggacggcaagattaccgaggaaaccatcccctacggcaccctgatttgggccaccggcaacaaggccagacccgtgatcaccgacctgttcaagaagatccccgagcagaacagcagcaagcggggcctggccgtgaacgacttcctgcaggtcaaaggcagcaacaacatcttcgccatcggcgacaacgcctttgccggcctgcctcctacagcccaggtggcccaccaggaagccgagtacctggccaagaacttcgacaagatggcccagatccccaatttccagaagaacctgtcctcccggaaggataagatcgacctgctgttcgaggaaaacaacttcaagcccttcaagtacaacgacctgggcgccctggcctacctgggcagcgaaagagccattgccaccatcagaagcggcaagcggaccttctacaccggcggaggcctgatgaccttctacctgtggcggatcctgtacctgagcatgatcctgagcgcccgcagcagactgaaggtgttcttcgactggatcaagctggccttcttcaagagggacttcttcaagggcctgtga

SEQ ID NO: 229 - DNA, 1542 bp, Artificial Sequence
  source: /note="Description of Artificial Sequence: Synthetic polynucleotide"
atgctgagcaagaacctgtacagcaacaagcggctgctgaccagcaccaacaccctcgtgcgcttcgccagcaccagatccaccggcgtcgaaaacagcggggctggccccaccagcttcaagaccatgaaggtcatcgacccccagcacagcgacaagcccaacgtgctgatcctgggctctggctggggcgccatcagctttctgaagcacatcgacaccaagaagtacaacgtcagcatcatcagccccagaagctacttcctgttcacccccctgctgcccagcgcccctgtgggaaccgtggacgagaagtccatcatcgagcccatcgtgaacttcgccctgaagaaaaagggcaacgtcacctactacgaggccgaggccaccagcatcaaccccgaccggaacaccgtgaccatcaagaacctgagcgccgtgtcccagctgtaccagcccgagaaccacctgggcctgcaccaggccgagcccgccgagattaagtacgactacctgatcagcgccgtgggcgccgagcccaacacctttggaatccccggcgtgaccgactacggccacttcctgaaagagatccccaacagcctggaaatccggcggaccttcgccgccaacctggaaaaggccaacctgctgcctaagggcgaccccgagcggagaaggctgctgagcatcgtggtcgtgggcggaggccccacaggcgtggaagctgctggcgagctgcaggactacgtgcaccaggacctgcggaagttcttccccgccctggccgaggaagtgcagattcacctggtggaagccctgcccatcgtgctgaacatgttcgagaagaagctgagcagctacgcccagagccacctggaaaacacctccatcaaggtgcacctgagaaccgccgtggccaaggtggaagagaagcagctgctggccaagaccaagcacgaggacggcaagattaccgaggaaaccatcccctacggcaccctgatttgggccaccggcaacaaggccagacccgtgatcaccgacctgttcaagaagatccccgagcagaacagcagcaagcggggcctggccgtgaacgacttcctgcaggtcaaaggcagcaacaacatcttcgccatcggcgacaacgcctttgccggcctgcctcctacagcccaggtggcccaccaggaagccgagtacctggccaagaacttcgacaagatggcccagatccccaatttccagaagaacctgtcctcccggaaggataagatcgacctgctgttcgaggaaaacaacttcaagcccttcaagtacaacgacctgggcgccctggcctacctgggcagcgaaagagccattgccaccatcagaagcggcaagcggaccttctacaccggcggaggcctgatgaccttctacctgtggcggatcctgtacctgagcatgatcctgagcgcccgcagcagactgaaggtgttcttcgactggatcaagctggccttcttcaagagggacttcttcaagggcctgtga

SEQ ID NO: 230 - DNA, 1542 bp, Artificial Sequence
  source: /note="Description of Artificial Sequence: Synthetic polynucleotide"
atgctgagcaagaacctgtacagcaacaagcggctgctgaccagcaccaacaccctcgtgcgcttcgccagcaccagatccaccggcgtcgaaaacagcggggctggccccaccagcttcaagaccatgaaggtcatcgacccccagcacagcgacaagcccaacgtgctgatcctgggctctggctggggcgccatcagctttctgaagcacatcgacaccaagaagtacaacgtcagcatcatcagccccagaagctacttcctgttcacccccctgctgcccagcgcccctgtgggaaccgtggacgagaagtccatcatcgagcccatcgtgaacttcgccctgaagaaaaagggcaacgtcacctactacgaggccgaggccaccagcatcaaccccgaccggaacaccgtgaccatcaagagcctgagcgccgtgtcccagctgtaccagcccgagaaccacctgggcctgcaccaggccgagcccgccgagattaagtacgactacctgatcagcgccgtgggcgccgagcccaacacctttggaatccccggcgtgaccgactacggccacttcctgaaagagatccccaacagcctggaaatccggcggaccttcgccgccaacctggaaaaggccaacctgctgcctaagggcgaccccgagcggagaaggctgctgagcatcgtggtcgtgggcggaggccccacaggcgtggaagctgctggcgagctgcaggactacgtgcaccaggacctgcggaagttcctgcccgccctggccgaggaagtgcagattcacctggtggaagccctgcccatcgtgctgaacatgttcgagaagaagctgagcagctacgcccagagccacctggaaaacacctccatcaaggtgcacctgagaaccgccgtggccaaggtggaagagaagcagctgctggccaagaccaagcacgaggacggcaagattaccgaggaaaccatcccctacggcaccctgatttgggccaccggcaacaaggccagacccgtgatcaccgacctgttcaagaagatccccgagcagaacagcagcaagcggggcctggccgtgaacgacttcctgcaggtcaaaggcagcaacaacatcttcgccatcggcgacaacgcctttgccggcctgcctcctacagcccaggtggcccaccaggaagccgagtacatcgccaagaacttcgacaagatggcccagatccccaatttccagaagaacctgtcctcccggaaggataagatcgacctgctgttcgaggaaaacaacttcaagcccttcaagtacaacgacctgggcgccctggcctacctgggcagcgaaagagccattgccaccatcagaagcggcaagcggaccttctacaccggcggaggcctgatgaccttctacctgtggcagatcctgtacctgagcatgatcctgagcgcccgcagcagactgaaggtgttcttcgactggatcaagctggccttcttcaagagggacttcttcaagggcctgtga

SEQ ID NO: 231 - DNA, 1542 bp, Artificial Sequence
  source: /note="Description of Artificial Sequence: Synthetic polynucleotide"
atgctgagcaagaacctgtacagcaaccggcggctgctgaccagcaccaacaccctcgtgcgcttcgccagcaccagatccaccggcgtcgaaaacagcggggctggccccaccagcttcaagaccatgaaggtcatcgacccccagcacagcgacaagcccaacgtgctgatcctgggctctggctggggcgccatcagctttctgaagcacatcgacaccaagaagtacaacgtcagcatcatcagccccagaagctacttcctgttcacccccctgctgcccagcgcccctgtgggaaccgtggacgagaagtccatcatcgagcccatcgtgaacttcgccctgaagaaaaagggcaacgtcacctactacgaggccgaggccaccagcatcaaccccgaccggaacaccgtgaccatcaagagcctgagcgccgtgtcccagctgtaccagcccgagaaccacctgggcctgcaccaggccgagcccgccgagattaagtacgactacctgatcagcgccgtgggcgccgagcccaacacctttggaatccccggcgtgaccgactacggccacttcctgaaagagatccccaacagcctggaaatccggcggaccttcgccgccaacctggaaaaggccaacctgctgcctaagggcgaccccgagcggagaaggctgctgagcatcgtggtcgtgggcggaggccccacaggcgtggaagctgctggcgagctgcaggactacgtgcaccaggacctgcggaagttcctgcccgccctggccgaggaagtgcagattcacctggtggaagccctgcccatcgtgctgaacatgttcgagaaggagctgagcagctacgcccagagccacctggaaaacacctccatcaaggtgcacctgagaaccgccgtggccaaggtggaagagaagcagctgctggccaagaccaagcacgaggacggcaagattaccgaggaaaccatcccctacggcaccctgatttgggccaccggcaacaaggccagacccgtgatcaccgacctgttcaagaagatccccgagcagaacagcagcaagcggggcctggccgtgaacgacttcctgcaggtcaaaggcagcaacaacatcttcgccatcggcgacaacgcctttgccggcctgcctcctacagcccaggtggcccaccaggaagccgagtacctggccaagaacttcgacaagatggcccagatccccaatttccagaagaacctgtcctcccggaaggataagatcgacctgctgttcgaggaaaacaacttcaagcccttcaagtacaacgacctgggcgccctggcctacctgggcagcgaaagagccattgccaccatcagaagcggcaagcggaccttctacaccggcggaggcctgatgaccttctacctgtggcggatcctgtacctgagcatgatcctgagcgcccgcagcagactgaaggtgttcttcgactggatcaagctggccttcttcaagagggacttcttcaagggcctgtga

SEQ ID NO: 232 - DNA, 1542 bp, Artificial Sequence
  source: /note="Description of Artificial Sequence: Synthetic polynucleotide"
atgctgagcaagaacctgtacagcaacaagcggctgctgaccagcaccaacaccctcgtgcgcttcgccagcaccagatccaccggcgtcgaaaacagcggggctggccccaccagcttcaagaccatgaaggtcatcgacccccagcacagcgacaagcccaacgtgctgatcctgggctctggctggggcgccatcagctttctgaagcacatcgacaccaagaagtacaacgtcagcatcatcagccccagaagctacttcctgttcacccccctgctgcccagcgcccctgtgggaaccgtggacgagaagtccatcatcgagcccatcgtgaacttcgccctgaagaaaaagggcaacgtcacctactacgaggccgaggccaccagcatcaaccccgaccggaacaccgtgaccatcaagagcctgagcgccgtgtcccagctgtaccagcccgagaaccacctgggcctgcaccaggccgagcccgccgagattaagtacgactacctgatcagcgccgtgggcgccgagcccaacacctttggaatccccggcgtgaccgactacggccacttcctgaaagagatccccaacagcctggaaatccggcggaccttcgccgccaacctggaaaaggccaacctgctgcctaagggcgaccccgagcggagaaggctgctgagcatcgtggtcgtgggcggaggccccacaggcgtggaagctgctggcgagctgcaggactacgtgcaccaggacctgcggaagttcctgcccgccctggccgaggaagtgcagattcacctggtggaagccctgcccatcgtgctgaacatgttcgagaagaagctgagcagctacgcccagagccacctggaaaacacctccatcaaggtgcacctgagaaccgccgtggccaaggtggaagagaagcagctgctggccaagaccaagcacgaggacggcaagattaccgaggaaaccatcccctacggcaccctgatttgggccaccggcaacaaggccagacccgtgatcaccgacctgttcaagaagatccccgagcagaacagcagcaagcggggcctggccgtgaacgacttcctgcaggtcgagggcagcaacaacatcttcgccatcggcgacaacgcctttgccggcctgcctcctacagcccaggtggcccaccaggaagccgagtacatcgccaagaacttcgacaagatggcccagatccccaatttccagaagaacctgtcctcccggaaggataagatcgacctgctgttcgaggaaaacaacttcaagcccttcaagtacaacgacctgggcgccctggcctacctgggcagcgaaagagccattgccaccatcagaagcggcaagcggaccttctacaccggcggaggcctgatgaccttctacctgtggcggatcctgtacctgagcatgatcctgagcgcccgcagcagactgaaggtgttcttcgactggatcaagctggccttcttcaagagggacttcttcaagggcctgtga

SEQ ID NO: 233 - DNA, 1542 bp, Artificial Sequence
  source: /note="Description of Artificial Sequence: Synthetic polynucleotide"
atgctgagcaagaacctgtacagcaacaagcggctgctgaccagcaccaacaccctcgtgcgcttcgccagcaccagatccaccggcgtcgaaaacagcggggctggccccaccagcttcaagaccatgaaggtcatcgacccccagcacagcgacaagcccaacgtgctgatcctgggctctggctggggcgccatcagctttctgaagcacatcgacaccaagaagtacaacgtcagcatcatcagccccagaagctacttcctgttcacccccctgctgcccagcgcccctgtgggaaccgtggacgagaagtccatcatcgagcccatcgtgaacttcgccctgaagaaaaagggcaacgtcacctactacgaggccgaggccaccagcatcaaccccgaccggaacaccgtgaccatcaagagcctgagcgccgtgtcccagctgtaccagcccgagaaccacctgggcctgcaccaggccgagcccgccgagattaagtacgactacctgatcagcgccgtgggcgccgagcccaacacctttggaatccccggcgtgaccgactacggccacttcctgaaagagatccccaacagcctggaaatccggcggaccttcgccgccaacctggaagaggccaacctgctgcctaagggcgaccccgagcggagaaggctgctgagcatcgtggtcgtgggcggaggccccacaggcgtggaagctgctggcgagctgcaggactacgtgcaccaggacctgcggaagttcttccccgccctggccgaggaagtgcagattcacctggtggaagccctgcccatcgtgctgaacatgttcgagaagaagctgagcagctacgcccagagccacctggaaaacacctccatcaaggtgcacctgagaaccgccgtggccaaggtggaagagaagcagctgctggccaagaccaagcacgaggacggcaagattaccgaggaaaccatcccctacggcaccctgatttgggccaccggcaacaaggccagacccgtgatcaccgacctgttcaagaagatccccgagcagaacagcagcaagcggggcctggccgtgaacgacttcctgcaggtcaaaggcagcaacaacatcttcgccatcggcgacaacgcctttgccggcctgcctcctacagcccaggtggcccaccaggaagccgagtacctggccaagaacttcgacaagatggcccagatccccaatttccagaagaacctgtcctcccggaaggataagatcgacctgctgttcgaggaaaacaacttcaagcccttcaagtacaacgacctgggcgccctggcctacctgggcagcgaaagagccattgccaccatcagaagcggcaagcggaccttctacaccggcggaggcctgatgaccttctacctgtggcggatcctgtacctgagcatgatcctgagcgcccgcagcagactgaaggtgttcttcgactggatcaagctggccttcttcaagagggacttcttcaagggcctgtga

SEQ ID NO: 234 - DNA, 1542 bp, Artificial Sequence
  source: /note="Description of Artificial Sequence: Synthetic polynucleotide"
atgctgagcaagaacctgtacagcaacaagcggctgctgaccagcaccaacaccctcgtgcgcttcgccagcaccagatccaccggcgtcgaaaacagcggggctggccccaccagcttcaagaccatgaaggtcatcgacccccagcacagcgacaagcccaacgtgctgatcctgggctctggctggggcgccatcagctttctgaagcacatcgacaccaagaagtacaacgtcagcatcatcagccccagaagctacttcctgttcacccccctgctgcccagcgcccctgtgggaaccgtggacgagaagtccatcatcgagcccatcgtgaacttcgccctgaagaaaaagggcaacgtcacctactacgaggccgaggccaccagcatcaaccccgaccggaacaccgtgaccatcaagaacctgagcgccgtgtcccagctgtaccagcccgagaaccacctgggcctgcaccaggccgagcccgccgagattaagtacgactacctgatcagcgccgtgggcgccgagcccaacacctttggaatccccggcgtgaccgactacggccacttcctgaaagagatccccaacagcctggaaatccggcggaccttcgccgccaacctggaagaggccaacctgctgcctaagggcgaccccgagcggagaaggctgctgagcatcgtggtcgtgggcggaggccccacaggcgtggaagctgctggcgagctgcaggactacgtgcaccaggacctgcggaagttcctgcccgccctggccgaggaagtgcagattcacctggtggaagccctgcccatcgtgctgaacatgttcgagaagaagctgagcagctacgcccagagccacctggaaaacacctccatcaaggtgcacctgagaaccgccgtggccaaggtggaagagaagcagctgctggccaagaccaagcacgaggacggcaagattaccgaggaaaccatcccctacggcaccctgatttgggccaccggcaacaaggccagacccgtgatcaccgacctgttcaagaagatccccgagcagaacagcagcaagcggggcctggccgtgaacgacttcctgcaggtcaaaggcagcaacaacatcttcgccatcggcgacaacgcctttgccggcctgcctcctacagcccaggtggcccaccaggaagccgagtacctggccaagaacttcgacaagatggcccagatccccaatttccagaagaacctgtcctcccggaaggataagatcgacctgctgttcgaggaaaacaacttcaagcccttcaagtacaacgacctgggcgccctggcctacctgggcagcgaaagagccattgccaccatcagaagcggcaagcggaccttctacaccggcggaggcctgatgaccttctacctgtggcggatcctgtacctgagcatgatcctgagcgcccgcagcagactgaaggtgttcttcgactggatcaagctggccttcttcaagagggacttcttcaagggcctgtga

SEQ ID NO: 235 - DNA, 1542 bp, Artificial Sequence
  source: /note="Description of Artificial Sequence: Synthetic polynucleotide"
atgctgagcaagaacctgtacagcaacaagcggctgctgaccagcaccaacaccctcgtgcgcttcgccagcaccagatccaccggcgtcgaaaacagcggggctggccccaccagcttcaagaccatgaaggtcatcgacccccagcacagcgacaagcccaacgtgctgatcctgggctctggctggggcgccatcagctttctgaagcacatcgacaccaagaagtacaacgtcagcatcatcagccccagaagctacttcctgttcacccccctgctgcccagcgcccctgtgggaaccgtggacgagaagtccatcatcgagcccatcgtgaacttcgccctgaagaaaaagggcaacgtcacctactacgaggccgaggccaccagcatcaaccccgaccggaacaccgtgaccatcaagagcctgagcgccgtgtcccagctgtaccagcccgagaaccacctgggcctgcaccaggccgagcccgccgagattaagtacgactacctgatcagcgccgtgggcgccgagcccaacacctttggaatccccggcgtgaccgactacggccacttcctgaaagagatccccaacagcctggaaatccggcggaccttcgccgccaacctggaaaaggccaacctgctgcctaagggcgaccccgagcggagaaggctgctgagcatcgtggtcgtgggcggaggccccacaggcgtggaagctgctggcgagctgcaggactacgtgcaccaggacctgcggaagttcctgcccgccctggccgaggaagtgcagattcacctggtggaagccctgcccatcgtgctgaacatgttcgagaaggagctgagcagctacgcccagagccacctggaaaacacctccatcaaggtgcacctgagaaccgccgtggccaaggtggaagagaagcagctgctggccaagaccaagcacgaggacggcaagattaccgaggaaaccatcccctacggcaccctgatttgggccaccggcaacaaggccagacccgtgatcaccgacctgttcaagaagatccccgagcagaacagcagcaagcggggcctggccgtgaacgacttcctgcaggtcgagggcagcaacaacatcttcgccatcggcgacaacgcctttgccggcctgcctcctacagcccaggtggcccaccaggaagccgagtacctggccaagaacttcgacaagatggcccagatccccaatttccagaagaacctgtcctcccggaaggataagatcgacctgctgttcgaggaaaacaacttcaagcccttcaagtacaacgacctgggcgccctggcctacctgggcagcgaaagagccattgccaccatcagaagcggcaagcggaccttctacaccggcggaggcctgatgaccttctacctgtggcggatcctgtacctgagcatgatcctgagcgcccgcagcagactgaaggtgttcttcgactggatcaagctggccttcttcaagagggacttcttcaagggcctgtga

SEQ ID NO: 236 - DNA, 1542 bp, Artificial Sequence
  source: /note="Description of Artificial Sequence: Synthetic polynucleotide"
atgctgagcaagaacctgtacagcaacaagcggctgctgaccagcaccaacaccctcgtgcgcttcgccagcaccagatccaccggcgtcgaaaacagcggggctggccccaccagcttcaagaccatgaaggtcatcgacccccagcacagcgacaagcccaacgtgctgatcctgggctctggctggggcgccatcagctttctgaagcacatcgacaccaagaagtacaacgtcagcatcatcagccccagaagctacttcctgttcacccccctgctgcccagcgcccctgtgggaaccgtggacgagaagtccatcatcgagcccatcgtgaacttcgccctgaagaaaaagggcaacgtcacctactacgaggccgaggccaccagcatcaaccccgaccggaacaccgtgaccatcaagagcctgagcgccgtgtcccagctgtaccagcccgagaaccacctgggcctgcaccaggccgagcccgccgagattaagtacgactacctgatcagcgccgtgggcgccgagcccaacacctttggaatccccggcgtgaccgactacggccacttcctgaaagagatccccaacagcctggaaatccggcggaccttcgccgccaacctggaaaaggccaacctgctgcctaagggcgaccccgagcggagaaggctgctgagcatcgtggtcgtgggcggaggccccacaggcgtggaagctgctggcgagctgcaggactacgtgcaccaggacctgcggaagttcttccccgccctggccgaggaagtgcagattcacctggtggaagccctgcccatcgtgctgaacatgttcgagaagaagctgagcagctacgcccagagccacctggaaaacacctccatcaaggtgcacctgagaaccgccgtggccaaggtggaagagaagcagctgctggccaagaccaagcacgaggacggcaagattaccgaggaaaccatcccctacggcaccctgatttgggccaccggcaacaaggccagacccgtgatcaccgacctgttcaagaagatccccgagcagaacagcagcaagcggggcctggccgtgaacgacttcctgcaggtcaaaggcagcaacaacatcttcgccatcggcgacaacgcctttagcggcctgcctcctacagcccaggtggcccaccaggaagccgagtacctggccaagaacttcgacaagatggcccagatccccaatttccagaagaacctgtcctcccggaaggataagatcgacctgctgttcgaggaaaacaacttcaagcccttcaagtacaacgacctgggcgccctggcctacctgggcagcgaaagagccattgccaccatcagaagcggcaagcggaccttctacaccggcggaggcctgatgaccttctacctgtggcggatcctgtacctgagcatgatcctgagcgcccgcagcagactgaaggtgttcttcgactggatcaagctggccttcttcaagagggacttcttcaagggcctgtga

SEQ ID NO: 237 - DNA, 1542 bp, Artificial Sequence
  source: /note="Description of Artificial Sequence: Synthetic polynucleotide"
atgctgagcaagaacctgtacagcaacaagcggctgctgaccagcaccaacaccctcgtgcgcttcgccagcaccagatccaccggcgtcgaaaacagcggggctggccccaccagcttcaagaccatgaaggtcatcgacccccagcacagcgacaagcccaacgtgctgatcctgggctctggctggggcgccatcagctttctgaagcacatcgacaccaagaagtacaacgtcagcatcatcagccccagaagctacttcctgttcacccccctgctgcccagcgcccctgtgggaaccgtggacgagaagtccatcatcgagcccatcgtgaacttcgccctgaagaaaaagggcaacgtcacctactacgaggccgaggccaccagcatcaaccccgaccggaacaccgtgaccatcaagagcctgagcgccgtgtcccagctgtaccagcccgagaaccacctgggcctgcaccaggccgagcccgccgagattaagtacgactacctgatcagcgccgtgggcgccgagcccaacacctttggaatccccggcgtgaccgactacggccacttcctgaaagagatccccaacagcctggaaatccggcggaccttcgccgccaacctggaaaaggccaacctgctgcctaagggcgaccccgagcggagaaggctgctgagcatcgtggtcgtgggcggaggccccacaggcgtggaagctgctggcgagctgcaggactacgtgcaccaggacctgcggaagttcctgcccgccctggccgaggaagtgcagattcacctggtggaagccctgcccatcgtgctgaacatgttcgagaagaagctgagcagctacgcccagagccacctggaaaacacctccatcaaggtgcacctgagaaccgccgtggccaaggtggaagagaagcagctgctggccaagaccaagcacgaggacggcaagattaccgaggaaaccatcccctacggcaccctgatttgggccaccggcaacaaggccagacccgtgatcaccgacctgttcaagaagatccccgagcagaacagcagcaagcggggcctggccgtgaacgacttcctgcaggtcgagggcagcaacaacatcttcgccatcggcgacaacgcctttgccggcctgcctcctacagcccaggtggcccaccaggaagccgagtacctggccaagaacttcgacaagatggcccagatccccaatttccagaagaacctgtcctcccggaaggataagatcgacctgctgttcgaggaaaacaacttcaagcccttcaagtacaacgacctgggcgccctggcctacctgggcagcgaaagagccattgccaccatcagaagcggcaagcggaccttctacaccggcggaggcctgatgaccttctacctgtggcagatcctgtacctgagcatgatcctgagcgcccgcagcagactgaaggtgttcttcgactggatcaagctggccttcttcaagagggacttcttcaagggcctgtga

SEQ ID NO: 238 - DNA, 1542 bp, Artificial Sequence
  source: /note="Description of Artificial Sequence: Synthetic polynucleotide"
atgctgagcaagaacctgtacagcaacaagcggctgctgaccagcaccaacaccctcgtgcgcttcgccagcaccagatccaccggcgtcgaaaacagcggggctggccccaccagcttcaagaccatgaaggtcatcgacccccagcacagcgacaagcccaacgtgctgatcctgggctctggctggggcgccatcagctttctgaagcacatcgacaccaagaagtacaacgtcagcatcatcagccccagaaagtacttcctgcacacccccctgctgcccagcgcccctgtgggaaccgtggacgagaagtccatcatcgagcccatcgtgaacttcgccctgaagaaaaagggcaacgtcacctactacgaggccgaggccaccagcatcaaccccgaccggaacaccgtgaccatcaagagcctgagcgccgtgtcccagctgtaccagcccgagaaccacctgggcctgcaccaggccgagcccgccgagattaagtacgactacctgatcagcgccgtgggcgccgagcccaacacctttggaatccccggcgtgaccgactacggccacttcctgaaagagatccccaacagcctggaaatccggcggaccttcgccgccaacctggaaaaggccaacctgctgcctaagggcgaccccgagcggagaaggctgctgagcatcgtggtcgtgggcggaggccccacaggcgtggaagctgctggcgagctgcaggactacgtgcaccaggacctgcggaagttcctgcccgccctggccgaggaagtgcagattcacctggtggaagccctgcccatcgtgctgaacatgttcgagaagaagctgagcagctacgcccagagccacctggaaaacacctccatcaaggtgcacctgagaaccgccgtggccaaggtggaagagaagcagctgctggccaagaccaagcacgaggacggcaagattaccgaggaaaccatcccctacggcaccctgatttgggccaccggcaacaaggccagacccgtgatcaccgacctgttcaagaagatccccgagcagaacagcagcaagcggggcctggccgtgaacgacttcctgcaggtcaaaggcagcaacaacatcttcgccatcggcgacaacgcctttgccggcctgcctcctacagcccaggtggcccaccaggaagccgagtacctggccaagaacttcgacaagatggcccagatccccaatttccagaagaacctgtcctcccggaaggataagatcgacctgctgttcgaggaaaacaacttcaagcccttcaagtacaacgacctgggcgccctggcctacctgggcagcgaaagagccattgccaccatcagaagcggcaagcggaccttctacaccggcggaggcctgatgaccttctacctgtggcggatcctgtacctgagcatgatcctgagcgcccgcagcagactgaaggtgttcttcgactggatcaagctggccttcttcaagagggacttcttcaagggcctgtga

SEQ ID NO: 239 - DNA, 1542 bp, Artificial Sequence
  source: /note="Description of Artificial Sequence: Synthetic polynucleotide"
atgctgagcaagaacctgtacagcaaccggcggctgctgaccagcaccaacaccctcgtgcgcttcgccagcaccagatccaccggcgtcgaaaacagcggggctggccccaccagcttcaagaccatgaaggtcatcgacccccagcacagcgacaagcccaacgtgctgatcctgggctctggctggggcgccatcagctttctgaagcacatcgacaccaagaagtacaacgtcagcatcatcagccccagaagctacttcctgttcacccccctgctgcccagcgcccctgtgggaaccgtggacgagaagtccatcatcgagcccatcgtgaacttcgccctgaagaaaaagggcaacgtcacctactacgaggccgaggccaccagcatcaaccccgaccggaacaccgtgaccatcaagaacctgagcgccgtgtcccagctgtaccagcccgagaaccacctgggcctgcaccaggccgagcccgccgagattaagtacgactacctgatcagcgccgtgggcgccgagcccaacacctttggaatccccggcgtgaccgactacggccacttcctgaaagagatccccaacagcctggaaatccggcggaccttcgccgccaacctggaaaaggccaacctgctgcctaagggcgaccccgagcggagaaggctgctgagcatcgtggtcgtgggcggaggccccacaggcgtggaagctgctggcgagctgcaggactacgtgcaccaggacctgcggaagttcctgcccgccctggccgaggaagtgcagattcacctggtggaagccctgcccatcgtgctgaacatgttcgagaagaagctgagcagctacgcccagagccacctggaaaacacctccatcaaggtgcacctgagaaccgccgtggccaaggtggaagagaagcagctgctggccaagaccaagcacgaggacggcaagattaccgaggaaaccatcccctacggcaccctgatttgggccaccggcaacaaggccagacccgtgatcaccgacctgttcaagaagatccccgagcagaacagcagcaagcggggcctggccgtgaacgacttcctgcaggtcaaaggcagcaacaacatcttcgccatcggcgacaacgcctttgccggcctgcctcctacagcccaggtggcccaccaggaagccgagtacctggccaagaacttcgacaagatggcccagatccccaatttccagaagaacctgtcctcccggaaggataagatcgacctgctgttcgaggaaaacaacttcaagcccttcaagtacaacgacctgggcgccctggcctacctgggcagcgaaagagccattgccaccatcagaagcggcaagcggaccttctacaccggcggaggcctgatgaccttctacctgtggcggatcctgtacctgagcatgatcctgagcgcccgcagcagactgaaggtgttcttcgactggatcaagctggccttcttcaagagggacttcttcaagggcctgtga

SEQ ID NO: 240 - DNA, 1542 bp, Artificial Sequence
  source: /note="Description of Artificial Sequence: Synthetic polynucleotide"
atgctgagcaagaacctgtacagcaaccggcggctgctgaccagcaccaacaccctcgtgcgcttcgccagcaccagatccaccggcgtcgaaaacagcggggctggccccaccagcttcaagaccatgaaggtcatcgacccccagcacagcgacaagcccaacgtgctgatcctgggctctggctggggcgccatcagctttctgaagcacatcgacaccaagaagtacaacgtcagcatcatcagccccagaagctacttcctgttcacccccctgctgcccagcgcccctgtgggaaccgtggacgagaagtccatcatcgagcccatcgtgaacttcgccctgaagaaaaagggcaacgtcacctactacgaggccgaggccaccagcatcaaccccgaccggaacaccgtgaccatcaagagcctgagcgccgtgtcccagctgtaccagcccgagaaccacctgggcctgcaccaggccgagcccgccgagattaagtacgactacctgatcagcgccgtgggcgccgagcccaacacctttggaatccccggcgtgaccgactacggccacttcctggaggagatccccaacagcctggaaatccggcggaccttcgccgccaacctggaaaaggccaacctgctgcctaagggcgaccccgagcggagaaggctgctgagcatcgtggtcgtgggcggaggccccacaggcgtggaagctgctggcgagctgcaggactacgtgcaccaggacctgcggaagttcctgcccgccctggccgaggaagtgcagattcacctggtggaagccctgcccatcgtgctgaacatgttcgagaagaagctgagcagctacgcccagagccacctggaaaacacctccatcaaggtgcacctgagaaccgccgtggccaaggtggaagagaagcagctgctggccaagaccaagcacgaggacggcaagattaccgaggaaaccatcccctacggcaccctgatttgggccaccggcaacaaggccagacccgtgatcaccgacctgttcaagaagatccccgagcagaacagcagcaagcggggcctggccgtgaacgacttcctgcaggtcaaaggcagcaacaacatcttcgccatcggcgacaacgcctttgccggcctgcctcctacagcccaggtggcccaccaggaagccgagtacctggccaagaacttcgacaagatggcccagatccccaatttccagaagaacctgtcctcccggaaggataagatcgacctgctgttcgaggaaaacaacttcaagcccttcaagtacaacgacctgggcgccctggcctacctgggcagcgaaagagccattgccaccatcagaagcggcaagcggaccttctacaccggcggaggcctgatgaccttctacctgtggcggatcctgtacctgagcatgatcctgagcgcccgcagcagactgaaggtgttcttcgactggatcaagctggccttcttcaagagggacttcttcaagggcctgtga

SEQ ID NO: 241 - DNA, 1542 bp, Artificial Sequence
  source: /note="Description of Artificial Sequence: Synthetic polynucleotide"
atgctgagcaagaacctgtacagcaacaagcggctgctgaccagcaccaacaccctcgtgcgcttcgccagcaccagatccaccggcgtcgaaaacagcggggctggccccaccagcttcaagaccatgaaggtcatcgacccccagcacagcgacaagcccaacgtgctgatcctgggctctggctggggcgccatcagctttctgaagcacatcgacaccaagaagtacaacgtcagcatcatcagccccagaagctacttcctgttcacccccctgctgcccagcgcccctgtgggaaccgtggacgagaagtccatcatcgagcccatcgtgaacttcgccctgaagaaaaagggcaacgtcacctactacgaggccgaggccaccagcatcaaccccgaccggaacaccgtgaccatcaagagcctgagcgccgtgtcccagctgtaccagcccgagaaccacctgggcctgcaccaggccgagcccgccgagattaagtacgactacctgatcagcgccgtgggcgccgagcccaacacctttggaatccccggcgtgaccgactacggccacttcctgaaagagatccccaacagcctggaaatccggcggaccttcgccgccaacctggaagaggccaacctgctgcctaagggcgaccccgagcggagaaggctgctgagcatcgtggtcgtgggcggaggccccacaggcgtggaagctgctggcgagctgcaggactacgtgcaccaggacctgcggaagttcctgcccgccctggccgaggaagtgcagattcacctggtggaagccctgcccatcgtgctgaacatgttcgagaagaagctgagcagctacgcccagagccacctggaaaacacctccatcaaggtgcacctgagaaccgccgtggccaaggtggaagagaagcagctgctggccaagaccaagcacgaggacggcaagattaccgaggaaaccatcccctacggcaccctgatttgggccaccggcaacaaggccagacccgtgatcaccgacctgttcaagaagatccccgagcagaacagcagcaagcggggcctggccgtgaacgacttcctgcaggtcaaaggcagcaacaacatcttcgccatcggcgacaacgcctttgccggcctgcctcctacagcccaggtggcccaccaggaagccgagtacctggccaagaacttcgacaagatggcccagatccccaatttccagaagaacctgtcctcccggaaggataagatcgacctgctgttcgaggaaaacaacttcaagcccttcaagtacaacgacctgggcgccctggcctacctgggcagcgaaagagccattgccaccatcagaagcggcaagcggaccttctacaccggcggaggcctgatgaccttctacctgtggcggatcctgtacctgagcatgatcctgagcgcccgcagcagactgaaggtgttcttcgactggatcaagatggccttcttcaagagggacttcttcaagggcctgtga

SEQ ID NO: 242 - DNA, 1542 bp, Artificial Sequence
  source: /note="Description of Artificial Sequence: Synthetic polynucleotide"
atgctgagcaagaacctgtacagcaacaagcggctgctgaccagcaccaacaccctcgtgcgcttcgccagcaccagatccaccggcgtcgaaaacagcggggctggccccaccagcttcaagaccatgaaggtcatcgacccccagcacagcgacaagcccaacgtgctgatcctgggctctggctggggcgccatcagctttctgaagcacatcgacaccaagaagtacaacgtcagcatcatcagccccagaagctacttcctgttcacccccctgatgcccagcgcccctgtgggaaccgtggacgagaagtccatcatcgagcccatcgtgaacttcgccctgaagaaaaagggcaacgtcacctactacgaggccgaggccaccagcatcaaccccgaccggaacaccgtgaccatcaagagcctgagcgccgtgtcccagctgtaccagcccgagaaccacctgggcctgcaccaggccgagcccgccgagattaagtacgactacctgatcagcgccgtgggcgccgagcccaacacctttggaatccccggcgtgaccgactacggccacttcctgaaagagatccccaacagcctggaaatccggcggaccttcgccgccaacctggaaaaggccaacctgctgcctaagggcgaccccgagcggagaaggctgctgagcatcgtggtcgtgggcggaggccccacaggcgtggaagctgctggcgagctgcaggactacgtgcaccaggacctgcggaagttcctgcccgccctggccgaggaagtgcagattcacctggtggaagccctgcccatcgtgctgaacatgttcgagaagaagctgagcagctacgcccagagccacctggaaaacacctccatcaaggtgcacctgagaaccgccgtggccaaggtggaagagaagcagctgctggccaagaccaagcacgaggacggcaagattaccgaggaaaccatcccctacggcaccctgatttgggccaccggcaacaaggccagacccgtgatcaccgacctgttcaagaagatccccgagcagaacagcagcaagcggggcctggccgtgaacgacttcctgcaggtcaaaggcagcaacaacatcttcgccatcggcgacaacgcctttgccggcctgcctcctacagcccaggtggcccaccaggaagccgagtacctggccaagaacttcgacaagatggcccagatccccaatttccagaagaacctgtcctcccggaaggataagatcgacctgctgttcgaggaaaacaacttcaagcccttcaagtacaacgacctgggcgccctggcctacctgggcagcgaaagagccattgccaccatcagaagcggcaagcggaccttctacaccggcggaggcctgatgaccttctacctgtggcggatcctgtacctgagcatgatcctgagcgcccgcagcagactgaaggtgttcttcgactggatcaagctggccttcttcaagagggacttcttcgagggcctgtga

SEQ ID NO: 243 - DNA, 1542 bp, Artificial Sequence
  source: /note="Description of Artificial Sequence: Synthetic polynucleotide"
atgctgagcaagaacctgtacagcaacaagcggctgctgaccagcaccaacaccctcgtgcgcttcgccagcaccagatccaccggcgtcgaaaacagcggggctggccccaccagcttcaagaccatgaaggtcatcgacccccagcacagcgacaagcccaacgtgctgatcctgggctctggctggggcgccatcagctttctgaagcacatcgacaccaagaagtacaacgtcagcatcatcagccccagaagctacttcctgttcacccccctgctgcccagcgcccctgtgggaaccgtggacgagaagtccatcatcgagcccatcgtgaacttcgccctgaagaaaaagggcaacgtcacctactacgaggccgaggccaccagcatcaaccccgaccggaacaccgtgaccatcaagagcctgagcgccgtgtcccagctgtaccagcccgagaaccacctgggcctgcaccaggccgagcccgccgagattaagtacgactacctgatcagcgccgtgggcgccgagcccaacacctttggaatccccggcgtgaccgactacggccacttcctgaaagagatccccaacagcctggaaatccggcggaccttcgccgccaacctggaaaaggccaacctgctgcctaagggcgaccccgagcggagaaggctgctgagcatcgtggtcgtgggcggaggccccacaggcgtggaagctgctggcgagctgcaggactacgtgcaccaggacctgcggaagttcctgcccgccctggccgaggaagtgcagattcacctggtggaagccctgcccatcgtgctgaacatgttcgagaagaagctgagcagctacgcccagagccacctggaaaacacctccatcaaggtgcacctgagaaccgccgtggccaaggtggaagagaagcagctgctggccaagaccaagcacgaggacggcaagattaccgaggaaaccatcccctacggcaccctgatttgggccaccggcaacaaggccagacccgtgatcaccgacctgttcaagaagatccccgagcagaacagcagcaagcggggcctggccgtgaacgacttcctgcaggtcaaaggcagcaacaacatcttcgccatcggcgacaacgcctttgccggcctgcctcctacagcccaggtggcccaccaggaagccgagtacctggccaagaacttcgacaagatggcccagatccccaatttccagaagaacctgtcctcccggaaggataagatcgacctgctgttcgaggaaaacaacttcaagcccttcaagtacaacgacctgggcgccctggcctacctgggcagcgaaagagccattgccaccatcagaagcggcaagcggaccttctacaccggcggaggcctgatgaccttctacctgtggcagatcctgtacctgagcatgatcctgagcgcccgcagcagactgaaggtgttcttcgactggatcaagctggccttcttcaagagggacttcttcgagggcctgtga

SEQ ID NO: 244 - DNA, 1542 bp, Artificial Sequence
  source: /note="Description of Artificial Sequence: Synthetic polynucleotide"
atgctatcgaagaatttgtatagtaacaagaggttgctcacctcgacgaatacgatggtcagattcgcttccaccagatccacaggggtggaaaactccggagcaggtcctacatcttttaagaccatgaaagtcattgaccctcagcacagcgacaaaccaaacgtgctgatactgggttcggggtggggagctatttcgtttttaaagcacattgacaccaagaagtacaacgtttccatcatctctcctagaagctatttcttatttacgcctttgttaccttctgcaccagttgggacagtagacgaaaagtcaattattgagcccatcgttaattttgctctcaagaaaaaggggaacgttacctactatgaggcagaagccacctctatcaatcccgacaggaataccgttaccataaaaaacttatctgccgttagccagctataccaacctgaaaaccatctagggctgcatcaagcagaacctgctgaaattaagtacgattatttaatcagtgctgtaggtgcggaacctaacacatttggtattcctggggtcactgattacggtcatttcctgaaggaaattcccaactctttggaaataagaagaacttttgccgccaatctagagaaggctaacttattgccaaagggtgatcccgaaagaagaagactactgtccattgtcgtggttggtggtgggcctactggtgtagaggccgctggtgaactacaggattatgttcaccaggacctgagaaagtttttccctgcattggccgaagaagtccaaattcacttggtcgaagctctgcccatcgttttgaatatgtttgagaaaaagctttcatcatacgcgcaatcacatttagaaaacacttcgatcaaagtacatctgagaacggctgtcgccaaagttgaagaaaagcaattgttggcaaagaccaaacacgaagacggtaaaataaccgaagaaactattccatacggtactttgatttgggccacgggtaacaaggcaagaccggtaatcactgaccttttcaagaaaattcctgagcaaaactcgtccaagagaggattggcagtgaatgactttttgcaggtgaaaggcagcaacaacattttcgccattggtgacaatgcatttgctgggttgccaccaaccgcccaagtagcgcaccaagaggccgaatatttggccaagaattttgataaaatggctcaaataccaaatttccaaaagaatctatcttcaagaaaggataaaattgatctcttgttcgaggagaacaactttaaacctttcaaatacaacgatttaggtgccttagcatacctgggatccgaaagggccattgcaaccatacgttccggtaagagaacattttacaccggtggtggcttaatgaccttctacttatggagaattttgtacttgtccatgattctatctgcaagatcgagattaaaggtctttttcgactggattaaattagcatttttcaaaagagacttttttaaaggattatag

SEQ ID NO: 245 - DNA, 1542 bp, Artificial Sequence
  source: /note="Description of Artificial Sequence: Synthetic polynucleotide"
atgctatcgaagaatttgtatagtaacaagaggttgctcacctcgacgaatacgctagtcagattcgcttccaccagatccacaggggtggaaaactccggagcaggtcctacatcttttaagaccatgaaagtcattgaccctcagcacagcgacaaaccaaacgtgctgatactgggttcggggtggggagctatttcgtttttaaagcacattgacaccaagaagtacaacgtttccatcatctctcctagaagctatttcttatttacgcctttgttaccttctgcaccagttgggacagtagacgaaaagtcaattattgagcccatcgttaattttgctctcaagaaaaaggggaacgttacctactatgaggcagaagccacctctatcaatcccgacaggaataccgttaccataaaatcattatctgccgttagccagctataccaacctgaaaaccatctagggatgcatcaagcagaacctgctgaaattaagtacgattatttaatcagtgctgtaggtgcggaacctaacacatttggtattcctggggtcactgattacggtcatttcctggaggaaattcccaactctttggaaataagaagaacttttgccgccaatctagagaaggctaacttattgccaaagggtgatcccgaaagaagaagactactgtccattgtcgtggttggtggtgggcctactggtgtagaggccgctggtgaactacaggattatgttcaccaggacctgagaaagtttctccctgcattggccgaagaagtccaaattcacttggtcgaagctctgcccatcgttttgaatatgtttgagaaaaagctttcatcatacgcgcaatcacatttagaaaacacttcgatcaaagtacatctgagaacggctgtcgccaaagttgaagaaaagcaattgttggcaaagaccaaacacgaagacggtaaaataaccgaagaaactattccatacggtactttgatttgggccacgggtaacaaggcaagaccggtaatcactgaccttttcaagaaaattcctgagcaaaactcgtccaagagaggattggcagtgaatgactttttgcaggtgaaaggcagcaacaacattttcgccattggtgacaatgcatttgctgggttgccaccaaccgcccaagtagcgcaccaagaggccgaatatttggccaagaattttgataaaatggctcaaataccaaatttccaaaagaatctatcttcaagaaaggataaaattgatctcttgttcgaggagaacaactttaaacctttcaaatacaacgatttaggtgccttagcatacctgggatccgaaagggccattgcaaccatacgttccggtaagagaacattttacaccggtggtggcttaatgaccttctacttatggcagattttgtacttgtccatgattctatctgcaagatcgagattaaaggtctttttcgactggattaaattagcatttttcaaaagagacttttttaaaggattatag

SEQ ID NO: 246 - DNA, 1542 bp, Artificial Sequence
  source: /note="Description of Artificial Sequence: Synthetic polynucleotide"
atgctatcgaagaatttgtatagtaacaagaggttgctcacctcgacgaatacgatggtcagattcgcttccaccagatccacaggggtggaaaactccggagcaggtcctacatcttttaagaccatgaaagtcattgaccctcagcacagcgacaaaccaaacgtgctgatactgggttcggggtggggagctatttcgtttttaaagcacattgacaccaagaagtacaacgtttccatcatctctcctagaagctatttcttatttacgcctttgttaccttctgcaccagttgggacagtagacgaaaagtcaattattgagcccatcgttaattttgctctcaagaaaaaggggaacgttacctactatgaggcagaagccacctctatcaatcccgacaggaataccgttaccataaaatcattatctgccgttagccagctataccaacctgaaaaccatctagggctgcatcaagcagaacctgctgaaattaagtacgattatttaatcagtgctgtaggtgcggaacctaacacatttggtattcctggggtcactgattacggtcatttcctggaggaaattcccaactctttggaaataagaagaacttttgccgccaatctagagaaggctaacttattgccaaagggtgatcccgaaagaagaagactactgtccattgtcgtggttggtggtgggcctactggtgtagaggccgctggtgaactacaggattatgttcaccaggacctgagaaagtttctccctgcattggccgaagaagtccaaattcacttggtcgaagctctgcccatcgttttgaatatgtttgagaaaaagctttcatcatacgcgcaatcacatttagaaaacacttcgatcaaagtacatctgagaacggctgtcgccaaagttgaagaaaagcaattgttggcaaagaccaaacacgaagacggtaaaataaccgaagaaactattccatacggtactttgatttgggccacgggtaacaaggcaagaccggtaatcactgaccttttcaagaaaattcctgagcaaaactcgtccaagagaggattggcagtgaatgactttttgcaggtgaaaggcagcaacaacattttcgccattggtgacaatgcatttgctgggttgccaccaaccgcccaagtagcgcaccaagaggccgaatatatcgccaagaattttgataaaatggctcaaataccaaatttccaaaagaatctatcttcaagaaaggataaaattgatctcttgttcgaggagaacaactttaaacctttcaaatacaacgatttaggtgccttagcatacctgggatccgaaagggccattgcaaccatacgttccggtaagagaacattttacaccggtggtggcttaatgaccttctacttatggagaattttgtacttgtccatgattctatctgcaagatcgagattaaaggtctttttcgactggattaaattagcatttttcaaaagagacttttttaaaggattatag

SEQ ID NO: 247 - DNA, 1542 bp, Artificial Sequence
  source: /note="Description of Artificial Sequence: Synthetic polynucleotide"
atgctatcgaagaatttgtatagtaacaagaggttgctcacctcgacgaatacgctagtcagattcgcttccaccagatccacaggggtggaaaactccggagcaggtcctacatcttttaagaccatgaaagtcattgaccctcagcacagcgacaaaccaaacgtgctgatactgggttcggggtggggagctatttcgtttttaaagcacattgacaccaagaagtacaacgtttccatcatctctcctagaaagtatttcttatttacgcctttgttaccttctgcaccagttgggacagtagacgaaaagtcaattattgagcccatcgttaattttgctctcaagaaaaaggggaacgttacctactatgaggcagaagccacctctatcaatcccgacaggaataccgttaccataaaaaacttatctgccgttagccagctataccaacctgaaaaccatctagggctgcatcaagcagaacctgctgaaattaagtacgattatttaatcagtgctgtaggtgcggaacctaacacatttggtattcctggggtcactgattacggtcatttcctgaaggaaattcccaactctttggaaataagaagaacttttgccgccaatctagagaaggctaacttattgccaaagggtgatcccgaaagaagaagactactgtccattgtcgtggttggtggtgggcctactggtgtagaggccgctggtgaactacaggattatgttcaccaggacctgagaaagtttctccctgcattggccgaagaagtccaaattcacttggtcgaagctctgcccatcgttttgaatatgtttgagaaaaagctttcatcatacgcgcaatcacatttagaaaacacttcgatcaaagtacatctgagaacggctgtcgccaaagttgaagaaaagcaattgttggcaaagaccaaacacgaagacggtaaaataaccgaagaaactattccatacggtactttgatttgggccacgggtaacaaggcaagaccggtaatcactgaccttttcaagaaaattcctgagcaaaactcgtccaagagaggattggcagtgaatgactttttgcaggtgaaaggcagcaacaacattttcgccattggtgacaatgcatttgctgggttgccaccaaccgcccaagtagcgcaccaagaggccgaatatttggccaagaattttgataaaatggctcaaataccaaatttccaaaagaatctatcttcaagaaaggataaaattgatctcttgttcgaggagaacaactttaaacctttcaaatacaacgatttaggtgccttagcatacctgggatccgaaagggccattgcaaccatacgttccggtaagagaacattttacaccggtggtggcttaatgaccttctacttatggagaattttgtacttgtccatgattctatctgcaagatcgagattaaaggtctttttcgactggattaaattagcatttttcaaaagagacttttttgagggattatag

SEQ ID NO: 248 - DNA, 1542 bp, Artificial Sequence
  source: /note="Description of Artificial Sequence: Synthetic polynucleotide"
atgctatcgaagaatttgtatagtaacaagaggttgctcacctcgacgaatacgatggtcagattcgcttccaccagatccacaggggtggaaaactccggagcaggtcctacatcttttaagaccatgaaagtcattgaccctcagcacagcgacaaaccaaacgtgctgatactgggttcggggtggggagctatttcgtttttaaagcacattgacaccaagaagtacaacgtttccatcatctctcctagaagctatttcttatttacgcctttgttaccttctgcaccagttgggacagtagacgaaaagtcaattattgagcccatcgttaattttgctctcaagaaaaaggggaacgttacctactatgaggcagaagccacctctatcaatcccgacaggaataccgttaccataaaatcattatctgccgttagccagctataccaacctgaaaaccatctagggctgcatcaagcagaacctgctgaaattaagtacgattatttaatcagtgctgtaggtgcggaacctaacacatttggtattcctggggtcactgattacggtcatttcctgaaggaaattcccaactctttggaaataagaagaacttttgccgccaatctagagaaggctaacttattgccaaagggtgatcccgaaagaagaagactactgtccattgtcgtggttggtggtgggcctactggtgtagaggccgctggtgaactacaggattatgttcaccaggacctgagaaagtttctccctgcattggccgaagaagtccaaattcacttggtcgaagctctgcccatcgttttgaatatgtttgagaaaaagctttcatcatacgcgcaatcacatttagaaaacacttcgatcaaagtacatctgagaacggctgtcgccaaagttgaagaaaagcaattgttggcaaagaccaaacacgaagacggtaaaataaccgaagaaactattccatacggtactttgatttgggccacgggtaacaaggcaagaccggtaatcactgaccttttcaagaaaattcctgagcaaaactcgtccaagagaggattggcagtgaatgactttttgcaggtgaaaggcagcaacaacattttcgccattggtgacaatgcatttgctgggttgccaccaaccgcccaagtagcgcaccaagaggccgaatatttggccaagaattttgataaaatggctcaaataccaaatttccaaaagaatctatcttcaagaaaggataaaattgatctcttgttcgaggagaacaactttaaacctttcaaatacaacgatttaggtgccttagcatacctgggatccgaaagggccattgcaaccatacgttccggtaagagaacattttacaccggtggtggcttaatgaccttctacttatggcagattttgtacatgtccatgattctatctgcaagatcgagattaaaggtctttttcgactggattaaattagcatttttcaaaagagacttttttaaaggattatag

SEQ ID NO: 249 - DNA, 1542 bp, Artificial Sequence
  source: /note="Description of Artificial Sequence: Synthetic polynucleotide"
atgctatcgaagaatttgtatagtaacaagaggttgctcacctcgacgaatacgctagtcagattcgcttccaccagatccacaggggtggaaaactccggagcaggtcctacatcttttaagaccatgaaagtcattgaccctcagcacagcgacaaaccaaacgtgctgatactgggttcggggtggggagctatttcgtttttaaagcacattgacaccaagaagtacaacgtttccatcatctctcctagaagctatttcttatttacgcctttgttaccttctgcaccagttgggacagtagacgaaaagtcaattattgagcccatcgttaattttgctctcaagaaaaaggggaacgttacctactatgaggcagaagccacctctatcaatcccgacaggaataccgttaccataaaatcattatctgccgttagccagctataccaacctgaaaaccatctagggctgcatcaagcagaacctgctgaaattaagtacgattatttaatcagtgctgtaggtgcggaacctaacacatttggtattcctggggtcactgattacggtcatttcctgaaggaaattcccaactctttggaaataagaagaacttttgccgccaatctagaggaggctaacttattgccaaagggtgatcccgaaagaagaagactactgtccattgtcgtggttggtggtgggcctactggtgtagaggccgctggtgaactacaggattatgttcaccaggacctgagaaagtttttccctgcattggccgaagaagtccaaattcacttggtcgaagctctgcccatcgttttgaatatgtttgagaaaaagctttcatcatacgcgcaatcacatttagaaaacacttcgatcaaagtacatctgagaacggctgtcgccaaagttgaagaaaagcaattgttggcaaagaccaaacacgaagacggtaaaataaccgaagaaactattccatacggtactttgatttgggccacgggtaacaaggcaagaccggtaatcactgaccttttcaagaaaattcctgagcaaaactcgtccaagagaggattggcagtgaatgactttttgcaggtgaaaggcagcaacaacattttcgccattggtgacaatgcatttgctgggttgccaccaaccgcccaagtagcgcaccaagaggccgaatatatcgccaagaattttgataaaatggctcaaataccaaatttccaaaagaatctatcttcaagaaaggataaaattgatctcttgttcgaggagaacaactttaaacctttcaaatacaacgatttaggtgccttagcatacctgggatccgaaagggccattgcaaccatacgttccggtaagagaacattttacaccggtggtggcttaatgaccttctacttatggagaattttgtacttgtccatgattctatctgcaagatcgagattaaaggtctttttcgactggattaaattagcatttttcaaaagagacttttttaaaggattatag

SEQ ID NO: 250 - DNA, 1542 bp, Artificial Sequence
  source: /note="Description of Artificial Sequence: Synthetic polynucleotide"
atgctatcgaagaatttgtatagtaaccggaggttgctcacctcgacgaatacgctagtcagattcgcttccaccagatccacaggggtggaaaactccggagcaggtcctacatcttttaagaccatgaaagtcattgaccctcagcacagcgacaaaccaaacgtgctgatactgggttcggggtggggagctatttcgtttttaaagcacattgacaccaagaagtacaacgtttccatcatctctcctagaagctatttcttacacacgcctttgatgccttctgcaccagttgggacagtagacgaaaagtcaattattgagcccatcgttaattttgctctcaagaaaaaggggaacgttacctactatgaggcagaagccacctctatcaatcccgacaggaataccgttaccataaaatcattatctgccgttagccagctataccaacctgaaaaccatctagggctgcatcaagcagaacctgctgaaattaagtacgattatttaatcagtgctgtaggtgcggaacctaacacatttggtattcctggggtcactgattacggtcatttcctgaaggaaattcccaactctttggaaataagaagaacttttgccgccaatctagagaaggctaacttattgccaaagggtgatcccgaaagaagaagactactgtccattgtcgtggttggtggtgggcctactggtgtagaggccgctggtgaactacaggattatgttcaccaggacctgagaaagtttctccctgcattggccgaagaagtccaaattcacttggtcgaagctctgcccatcgttttgaatatgtttgagaaaaagctttcatcatacgcgcaatcacatttagaaaacacttcgatcaaagtacatctgagaacggctgtcgccaaagttgaagaaaagcaattgttggcaaagaccaaacacgaagacggtaaaataaccgaagaaactattccatacggtactttgatttgggccacgggtaacaaggcaagaccggtaatcactgaccttttcaagaaaattcctgagcaaaactcgtccaagagaggattggcagtgaatgactttttgcaggtgaaaggcagcaacaacattttcgccattggtgacaatgcatttgctgggttgccaccaaccgcccaagtagcgcaccaagaggccgaatatttggccaagaattttgataaaatggctcaaataccaaatttccaaaagaatctatcttcaagaaaggataaaattgatctcttgttcgaggagaacaactttaaacctttcaaatacaacgatttaggtgccttagcatacctgggatccgaaagggccattgcaaccatacgttccggtaagagaacattttacaccggtggtggcttaatgaccttctacttatggagaattttgtacttgtccatgattctatctgcaagatcgagattaaaggtctttttcgactggattaaattagcatttttcaaaagagacttttttaaaggattatag

SEQ ID NO: 251 - DNA, 1542 bp, Artificial Sequence
  source: /note="Description of Artificial Sequence: Synthetic polynucleotide"
atgctatcgaagaatttgtatagtaaccggaggttgctcacctcgacgaatacgctagtcagattcgcttccaccagatccacaggggtggaaaactccggagcaggtcctacatcttttaagaccatgaaagtcattgaccctcagcacagcgacaaaccaaacgtgctgatactgggttcggggtggggagctatttcgtttttaaagcacattgacaccaagaagtacaacgtttccatcatctctcctagaagctatttcttatttacgcctttgatgccttctgcaccagttgggacagtagacgaaaagtcaattattgagcccatcgttaattttgctctcaagaaaaaggggaacgttacctactatgaggcagaagccacctctatcaatcccgacaggaataccgttaccataaaatcattatctgccgttagccagctataccaacctgaaaaccatctagggctgcatcaagcagaacctgctgaaattaagtacgattatttaatcagtgctgtaggtgcggaacctaacacatttggtattcctggggtcactgattacggtcatttcctgaaggaaattcccaactctttggaaataagaagaacttttgccgccaatctagagaaggctaacttattgccaaagggtgatcccgaaagaagaagactactgtccattgtcgtggttggtggtgggcctactggtgtagaggccgctggtgaactacaggattatgttcaccaggacctgagaaagtttttccctgcattggccgaagaagtccaaattcacttggtcgaagctctgcccatcgttttgaatatgtttgagaaaaagctttcatcatacgcgcaatcacatttagaaaacacttcgatcaaagtacatctgagaacggctgtcgccaaagttgaagaaaagcaattgttggcaaagaccaaacacgaagacggtaaaataaccgaagaaactattccatacggtactttgatttgggccacgggtaacaaggcaagaccggtaatcactgaccttttcaagaaaattcctgagcaaaactcgtccaagagaggattggcagtgaatgactttttgcaggtgaaaggcagcaacaacattttcgccattggtgacaatgcatttgctgggttgccaccaaccgcccaagtagcgcaccaagaggccgaatatttggccaagaattttgataaaatggctcaaataccaaatttccaaaagaatctatcttcaagaaaggataaaattgatctcttgttcgaggagaacaactttaaacctttcaaatacaacgatttaggtgccttagcatacctgggatccgaaagggccattgcaaccatacgttccggtaagagaacattttacaccggtggtggcttaatgaccttctacttatggagaattttgtacttgtccatgattctatctgcaagatcgagattaaaggtctttttcgactggattaaattagcatttttcaaaagagacttttttaaaggattatag

SEQ ID NO: 252 - DNA, 1542 bp, Artificial Sequence
  source: /note="Description of Artificial Sequence: Synthetic polynucleotide"
atgctatcgaagaatttgtatagtaaccggaggttgctcacctcgacgaatacgctagtcagattcgcttccaccagatccacaggggtggaaaactccggagcaggtcctacatcttttaagaccatgaaagtcattgaccctcagcacagcgacaaaccaaacgtgctgatactgggttcggggtggggagctatttcgtttttaaagcacattgacaccaagaagtacaacgtttccatcatctctcctagaagctatttcttatttacgcctttgttaccttctgcaccagttgggacagtagacgaaaagtcaattattgagcccatcgttaattttgctctcaagaaaaaggggaacgttacctactatgaggcagaagccacctctatcaatcccgacaggaataccgttaccataaaatcattatctgccgttagccagctataccaacctgaaaaccatctagggctgcatcaagcagaacctgctgaaattaagtacgattatttaatcagtgctgtaggtgcggaacctaacacatttggtattcctggggtcactgattacggtcatttcctgaaggaaattcccaactctttggaaataagaagaacttttgccgccaatctagagaaggctaacttattgccaaagggtgatcccgaaagaagaagactactgtccattgtcgtggttggtggtgggcctactggtgtagaggccgctggtgaactacaggattatgttcaccaggacctgagaaagtttctccctgcattggccgaagaagtccaaattcacttggtcgaagctctgcccatcgttttgaatatgtttgagaaagagctttcatcatacgcgcaatcacatttagaaaacacttcgatcaaagtacatctgagaacggctgtcgccaaagttgaagaaaagcaattgttggcaaagaccaaacacgaagacggtaaaataaccgaagaaactattccatacggtactttgatttgggccacgggtaacaaggcaagaccggtaatcactgaccttttcaagaaaattcctgagcaaaactcgtccaagagaggattggcagtgaatgactttttgcaggtgaaaggcagcaacaacattttcgccattggtgacaatgcatttgctgggttgccaccaaccgcccaagtagcgcaccaagaggccgaatatttggccaagaattttgataaaatggctcaaataccaaatttccaaaagaatctatcttcaagaaaggataaaattgatctcttgttcgaggagaacaactttaaacctttcaaatacaacgatttaggtgccttagcatacctgggatccgaaagggccattgcaaccatacgttccggtaagagaacattttacaccggtggtggcttaatgaccttctacttatggcagattttgtacttgtccatgattctatctgcaagatcgagattaaaggtctttttcgactggattaaattagcatttttcaaaagagacttttttaaaggattatag

SEQ ID NO: 253 - DNA, 1542 bp, Artificial Sequence
  source: /note="Description of Artificial Sequence: Synthetic polynucleotide"
atgctatcgaagaatttgtatagtaacaagaggttgctcacctcgacgaatacgatggtcagattcgcttccaccagatccacaggggtggaaaactccggagcaggtcctacatcttttaagaccatgaaagtcattgaccctcagcacagcgacaaaccaaacgtgctgatactgggttcggggtggggagctatttcgtttttaaagcacattgacaccaagaagtacaacgtttccatcatctctcctagaaagtatttcttatttacgcctttgttaccttctgcaccagttgggacagtagacgaaaagtcaattattgagcccatcgttaattttgctctcaagaaaaaggggaacgttacctactatgaggcagaagccacctctatcaatcccgacaggaataccgttaccataaaatcattatctgccgttagccagctataccaacctgaaaaccatctagggctgcatcaagcagaacctgctgaaattaagtacgattatttaatcagtgctgtaggtgcggaacctaacacatttggtattcctggggtcactgattacggtcatttcctgaaggaaattcccaactctttggaaataagaagaacttttgccgccaatctagagaaggctaacttattgccaaagggtgatcccgaaagaagaagactactgtccattgtcgtggttggtggtgggcctactggtgtagaggccgctggtgaactacaggattatgttcaccaggacctgagaaagtttctccctgcattggccgaagaagtccaaattcacttggtcgaagctctgcccatcgttttgaatatgtttgagaaaaagctttcatcatacgcgcaatcacatttagaaaacacttcgatcaaagtacatctgagaacggctgtcgccaaagttgaagaaaagcaattgttggcaaagaccaaacacgaagacggtaaaataaccgaagaaactattccatacggtactttgatttgggccacgggtaacaaggcaagaccggtaatcactgaccttttcaagaaaattcctgagcaaaactcgtccaagagaggattggcagtgaatgactttttgcaggtgaaaggcagcaacaacattttcgccattggtgacaatgcatttgctgggttgccaccaaccgcccaagtagcgcaccaagaggccgaatatttggccaagaattttgataaaatggctcaaataccaaatttccaaaagaatctatcttcaagaaaggataaaattgatctcttgttcgaggagaacaactttaaacctttcaaatacaacgatttaggtgccttagcatacctgggatccgaaagggccattgcaaccatacgttccggtaagagaacattttacaccggtggtggcttaatgaccttctacttatggcagattttgtacttgtccatgattctatctgcaagatcgagattaaaggtctttttcgactggattaaattagcatttttcaaaagagacttttttaaaggattatag

SEQ ID NO: 254 - DNA, 1542 bp, Artificial Sequence
  source: /note="Description of Artificial Sequence: Synthetic polynucleotide"
atgctatcgaagaatttgtatagtaacaagaggttgctcacctcgacgaatacgctagtcagattcgcttccaccagatccacaggggtggaaaactccggagcaggtcctacatcttttaagaccatgaaagtcattgaccctcagcacagcgacaaaccaaacgtgctgatactgggttcggggtggggagctatttcgtttttaaagcacattgacaccaagaagtacaacgtttccatcatctctcctagaagctatttcttatttacgcctttgttaccttctgcaccagttgggacagtagacgaaaagtcaattattgagcccatcgttaattttgctctcaagaaaaaggggaacgttacctactatgaggcagaagccacctctatcaatcccgacaggaataccgttaccataaaatcattatctgccgttagccagctataccaacctgaaaaccatctagggctgcatcaagcagaacctgctgaaattaagtacgattatttaatcagtgctgtaggtgcggaacctaacacatttggtattcctggggtcactgattacggtcatttcctgaaggaaattcccaactctttggaaataagaagaacttttgccgccaatctagaggaggctaacttattgccaaagggtgatcccgaaagaagaagactactgtccattgtcgtggttggtggtgggcctactggtgtagaggccgctggtgaactacaggattatgttcaccaggacctgagaaagtttctccctgcattggccgaagaagtccaaattcacttggtcgaagctctgcccatcgttttgaatatgtttgagaaaaagctttcatcatacgcgcaatcacatttagaaaacacttcgatcaaagtacatctgagaacggctgtcgccaaagttgaagaaaagcaattgttggcaaagaccaaacacgaagacggtaaaataaccgaagaaactattccatacggtactttgatttgggccacgggtaacaaggcaagaccggtaatcactgaccttttcaagaaaattcctgagcaaaactcgtccaagagaggattggcagtgaatgactttttgcaggtggagggcagcaacaacattttcgccattggtgacaatgcatttgctgggttgccaccaaccgcccaagtagcgcaccaagaggccgaatatttggccaagaattttgataaaatggctcaaataccaaatttccaaaagaatctatcttcaagaaaggataaaattgatctcttgttcgaggagaacaactttaaacctttcaaatacaacgatttaggtgccttagcatacctgggatccgaaagggccattgcaaccatacgttccggtaagagaacattttacaccggtggtggcttaatgaccttctacttatggagaattttgtacttgtccatgattctatctgcaagatcgagattaaaggtctttttcgactggattaaaatggcatttttcaaaagagacttttttaaaggattatag

SEQ ID NO: 255 - DNA, 1542 bp, Artificial Sequence
  source: /note="Description of Artificial Sequence: Synthetic polynucleotide"
atgctatcgaagaatttgtatagtaacaagaggttgctcacctcgacgaatacgctagtcagattcgcttccaccagatccacaggggtggaaaactccggagcaggtcctacatcttttaagaccatgaaagtcattgaccctcagcacagcgacaaaccaaacgtgctgatactgggttcggggtggggagctatttcgtttttaaagcacattgacaccaagaagtacaacgtttccatcatctctcctagaagctatttcttatttacgcctttgttaccttctgcaccagttgggacagtagacgaaaagtcaattattgagcccatcgttaattttgctctcaagaaaaaggggaacgttacctactatgaggcagaagccacctctatcaatcccgacaggaataccgttaccataaaaaacttatctgccgttagccagctataccaacctgaaaaccatctagggctgcatcaagcagaacctgctgaaattaagtacgattatttaatcagtgctgtaggtgcggaacctaacacatttggtattcctggggtcactgattacggtcatttcctggaggaaattcccaactctttggaaataagaagaacttttgccgccaatctagagaaggctaacttattgccaaagggtgatcccgaaagaagaagactactgtccattgtcgtggttggtggtgggcctactggtgtagaggccgctggtgaactacaggattatgttcaccaggacctgagaaagtttctccctgcattggccgaagaagtccaaattcacttggtcgaagctctgcccatcgttttgaatatgtttgagaaaaagctttcatcatacgcgcaatcacatttagaaaacacttcgatcaaagtacatctgagaacggctgtcgccaaagttgaagaaaagcaattgttggcaaagaccaaacacgaagacggtaaaataaccgaagaaactattccatacggtactttgatttgggccacgggtaacaaggcaagaccggtaatcactgaccttttcaagaaaattcctgagcaaaactcgtccaagagaggattggcagtgaatgactttttgcaggtgaaaggcagcaacaacattttcgccattggtgacaatgcatttgctgggttgccaccaaccgcccaagtagcgcaccaagaggccgaatatttggccaagaattttgataaaatggctcaaataccaaatttccaaaagaatctatcttcaagaaaggataaaattgatctcttgttcgaggagaacaactttaaacctttcaaatacaacgatttaggtgccttagcatacctgggatccgaaagggccattgcaaccatacgttccggtaagagaacattttacaccggtggtggcttaatgaccttctacttatggagaattttgtacatgtccatgattctatctgcaagatcgagattaaaggtctttttcgactggattaaattagcatttttcaaaagagacttttttaaaggattatag

SEQ ID NO: 256 - DNA, 1542 bp, Artificial Sequence
  source: /note="Description of Artificial Sequence: Synthetic polynucleotide"
atgctatcgaagaatttgtatagtaacaagaggttgctcacctcgacgaatacgctagtcagattcgcttccaccagatccacaggggtggaaaactccggagcaggtcctacatcttttaagaccatgaaagtcattgaccctcagcacagcgacaaaccaaacgtgctgatactgggttcggggtggggagctatttcgtttttaaagcacattgacaccaagaagtacaacgtttccatcatctctcctagaaagtatttcttatttacgcctttgttaccttctgcaccagttgggacagtagacgaaaagtcaattattgagcccatcgttaattttgctctcaagaaaaaggggaacgttacctactatgaggcagaagccacctctatcaatcccgacaggaataccgttaccataaaatcattatctgccgttagccagctataccaacctgaaaaccatctagggctgcatcaagcagaacctgctgaaattaagtacgattatttaatcagtgctgtaggtgcggaacctaacacatttggtattcctggggtcactgattacggtcatttcctgaaggaaattcccaactctttggaaataagaagaacttttgccgccaatctagaggaggctaacttattgccaaagggtgatcccgaaagaagaagactactgtccattgtcgtggttggtggtgggcctactggtgtagaggccgctggtgaactacaggattatgttcaccaggacctgagaaagtttctccctgcattggccgaagaagtccaaattcacttggtcgaagctctgcccatcgttttgaatatgtttgagaaaaagctttcatcatacgcgcaatcacatttagaaaacacttcgatcaaagtacatctgagaacggctgtcgccaaagttgaagaaaagcaattgttggcaaagaccaaacacgaagacggtaaaataaccgaagaaactattccatacggtactttgatttgggccacgggtaacaaggcaagaccggtaatcactgaccttttcaagaaaattcctgagcaaaactcgtccaagagaggattggcagtgaatgactttttgcaggtgaaaggcagcaacaacattttcgccattggtgacaatgcatttgctgggttgccaccaaccgcccaagtagcgcaccaagaggccgaatatttggccaagaattttgataaaatggctcaaataccaaatttccaaaagaatctatcttcaagaaaggataaaattgatctcttgttcgaggagaacaactttaaacctttcaaatacaacgatttaggtgccttagcatacctgggatccgaaagggccattgcaaccatacgttccggtaagagaacattttacaccggtggtggcttaatgaccttctacttatggagaattttgtacttgtccatgattctatctgcaagatcgagattaaaggtctttttcgactggattaaattagcatttttcaaaagagacttttttgagggattatag

SEQ ID NO: 257 - DNA, 1542 bp, Artificial Sequence
  source: /note="Description of Artificial Sequence: Synthetic polynucleotide"
atgctatcgaagaatttgtatagtaacaagaggttgctcacctcgacgaatacgctagtcagattcgcttccaccagatccacaggggtggaaaactccggagcaggtcctacatcttttaagaccatgaaagtcattgaccctcagcacagcgacaaaccaaacgtgctgatactgggttcggggtggggagctatttcgtttttaaagcacattgacaccaagaagtacaacgtttccatcatctctcctagaagctatttcttatttacgcctttgttaccttctgcaccagttgggacagtagacgaaaagtcaattattgagcccatcgttaattttgctctcaagaaaaaggggaacgttacctactatgaggcagaagccacctctatcaatcccgacaggaataccgttaccataaaaaacttatctgccgttagccagctataccaacctgaaaaccatctagggctgcatcaagcagaacctgctgaaattaagtacgattatttaatcagtgctgtaggtgcggaacctaacacatttggtattcctggggtcactgattacggtcatttcctgaaggaaattcccaactctttggaaataagaagaacttttgccgccaatctagaggaggctaacttattgccaaagggtgatcccgaaagaagaagactactgtccattgtcgtggttggtggtgggcctactggtgtagaggccgctggtgaactacaggattatgttcaccaggacctgagaaagtttctccctgcattggccgaagaagtccaaattcacttggtcgaagctctgcccatcgttttgaatatgtttgagaaagagctttcatcatacgcgcaatcacatttagaaaacacttcgatcaaagtacatctgagaacggctgtcgccaaagttgaagaaaagcaattgttggcaaagaccaaacacgaagacggtaaaataaccgaagaaactattccatacggtactttgatttgggccacgggtaacaaggcaagaccggtaatcactgaccttttcaagaaaattcctgagcaaaactcgtccaagagaggattggcagtgaatgactttttgcaggtgaaaggcagcaacaacattttcgccattggtgacaatgcatttgctgggttgccaccaaccgcccaagtagcgcaccaagaggccgaatatttggccaagaattttgataaaatggctcaaataccaaatttccaaaagaatctatcttcaagaaaggataaaattgatctcttgttcgaggagaacaactttaaacctttcaaatacaacgatttaggtgccttagcatacctgggatccgaaagggccattgcaaccatacgttccggtaagagaacattttacaccggtggtggcttaatgaccttctacttatggagaattttgtacttgtccatgattctatctgcaagatcgagattaaaggtctttttcgactggattaaattagcatttttcaaaagagacttttttaaaggattatag

SEQ ID NO: 258 - DNA, 1542 bp, Artificial Sequence
  source: /note="Description of Artificial Sequence: Synthetic polynucleotide"
atgctatcgaagaatttgtatagtaacaagaggttgctcacctcgacgaatacgctagtcagattcgcttccaccagatccacaggggtggaaaactccggagcaggtcctacatcttttaagaccatgaaagtcattgaccctcagcacagcgacaaaccaaacgtgctgatactgggttcggggtggggagctatttcgtttttaaagcacattgacaccaagaagtacaacgtttccatcatctctcctagaaagtatttcttatttacgcctttgatgccttctgcaccagttgggacagtagacgaaaagtcaattattgagcccatcgttaattttgctctcaagaaaaaggggaacgttacctactatgaggcagaagccacctctatcaatcccgacaggaataccgttaccataaaatcattatctgccgttagccagctataccaacctgaaaaccatctagggctgcatcaagcagaacctgctgaaattaagtacgattatttaatcagtgctgtaggtgcggaacctaacacatttggtattcctggggtcactgattacggtcatttcctgaaggaaattcccaactctttggaaataagaagaacttttgccgccaatctagagaaggctaacttattgccaaagggtgatcccgaaagaagaagactactgtccattgtcgtggttggtggtgggcctactggtgtagaggccgctggtgaactacaggattatgttcaccaggacctgagaaagtttctccctgcattggccgaagaagtccaaattcacttggtcgaagctctgcccatcgttttgaatatgtttgagaaaaagctttcatcatacgcgcaatcacatttagaaaacacttcgatcaaagtacatctgagaacggctgtcgccaaagttgaagaaaagcaattgttggcaaagaccaaacacgaagacggtaaaataaccgaagaaactattccatacggtactttgatttgggccacgggtaacaaggcaagaccggtaatcactgaccttttcaagaaaattcctgagcaaaactcgtccaagagaggattggcagtgaatgactttttgcaggtgaaaggcagcaacaacattttcgccattggtgacaatgcatttagcgggttgccaccaaccgcccaagtagcgcaccaagaggccgaatatttggccaagaattttgataaaatggctcaaataccaaatttccaaaagaatctatcttcaagaaaggataaaattgatctcttgttcgaggagaacaactttaaacctttcaaatacaacgatttaggtgccttagcatacctgggatccgaaagggccattgcaaccatacgttccggtaagagaacattttacaccggtggtggcttaatgaccttctacttatggagaattttgtacttgtccatgattctatctgcaagatcgagattaaaggtctttttcgactggattaaattagcatttttcaaaagagacttttttaaaggattatag

SEQ ID NO: 259 - DNA, 1542 bp, Artificial Sequence
  source: /note="Description of Artificial Sequence: Synthetic polynucleotide"
atgctatcgaagaatttgtatagtaaccggaggttgctcacctcgacgaatacgctagtcagattcgcttccaccagatccacaggggtggaaaactccggagcaggtcctacatcttttaagaccatgaaagtcattgaccctcagcacagcgacaaaccaaacgtgctgatactgggttcggggtggggagctatttcgtttttaaagcacattgacaccaagaagtacaacgtttccatcatctctcctagaagctatttcttatttacgcctttgttaccttctgcaccagttgggacagtagacgaaaagtcaattattgagcccatcgttaattttgctctcaagaaaaaggggaacgttacctactatgaggcagaagccacctctatcaatcccgacaggaataccgttaccataaaaaacttatctgccgttagccagctataccaacctgaaaaccatctagggctgcatcaagcagaacctgctgaaattaagtacgattatttaatcagtgctgtaggtgcggaacctaacacatttggtattcctggggtcactgattacggtcatttcctgaaggaaattcccaactctttggaaataagaagaacttttgccgccaatctagagaaggctaacttattgccaaagggtgatcccgaaagaagaagactactgtccattgtcgtggttggtggtgggcctactggtgtagaggccgctggtgaactacaggattatgttcaccaggacctgagaaagtttctccctgcattggccgaagaagtccaaattcacttggtcgaagctctgcccatcgttttgaatatgtttgagaaaaagctttcatcatacgcgcaatcacatttagaaaacacttcgatcaaagtacatctgagaacggctgtcgccaaagttgaagaaaagcaattgttggcaaagaccaaacacgaagacggtaaaataaccgaagaaactattccatacggtactttgatttgggccacgggtaacaaggcaagaccggtaatcactgaccttttcaagaaaattcctgagcaaaactcgtccaagagaggattggcagtgaatgactttttgcaggtgaaaggcagcaacaacattttcgccattggtgacaatgcatttgctgggttgccaccaaccgcccaagtagcgcaccaagaggccgaatatttggccaagaattttgataaaatggctcaaataccaaatttccaaaagaatctatcttcaagaaaggataaaattgatctcttgttcgaggagaacaactttaaacctttcaaatacaacgatttaggtgccttagcatacctgggatccgaaagggccattgcaaccatacgttccggtaagagaacattttacaccggtggtggcttaatgaccttctacttatggagaattttgtacatgtccatgattctatctgcaagatcgagattaaaggtctttttcgactggattaaattagcatttttcaaaagagacttttttaaaggattatag

SEQ ID NO: 260 - DNA, 1542 bp, Artificial Sequence
  source: /note="Description of Artificial Sequence: Synthetic polynucleotide"
atgctatcgaagaatttgtatagtaacaagaggttgctcacctcgacgaatacgctagtcagattcgcttccaccagatccacaggggtggaaaactccggagcaggtcctacatcttttaagaccatgaaagtcattgaccctcagcacagcgacaaaccaaacgtgctgatactgggttcggggtggggagctatttcgtttttaaagcacattgacaccaagaagtacaacgtttccatcatctctcctagaaagtatttcttatttacgcctttgttaccttctgcaccagttgggacagtagacgaaaagtcaattattgagcccatcgttaattttgctctcaagaaaaaggggaacgttacctactatgaggcagaagccacctctatcaatcccgacaggaataccgttaccataaaatcattatctgccgttagccagctataccaacctgaaaaccatctagggctgcatcaagcagaacctgctgaaattaagtacgattatttaatcagtgctgtaggtgcggaacctaacacatttggtattcctggggtcactgattacggtcatttcttcaaggaaattcccaactctttggaaataagaagaacttttgccgccaatctagagaaggctaacttattgccaaagggtgatcccgaaagaagaagactactgtccattgtcgtggttggtggtgggcctactggtgtagaggccgctggtgaactacaggattatgttcaccaggacctgagaaagtttctccctgcattggccgaagaagtccaaattcacttggtcgaagctctgcccatcgttttgaatatgtttgagaaaaagctttcatcatacgcgcaatcacatttagaaaacacttcgatcaaagtacatctgagaacggctgtcgccaaagttgaagaaaagcaattgttggcaaagaccaaacacgaagacggtaaaataaccgaagaaactattccatacggtactttgatttgggccacgggtaacaaggcaagaccggtaatcactgaccttttcaagaaaattcctgagcaaaactcgtccaagagaggattggcagtgaatgactttttgcaggtgaaaggcagcaacaacattttcgccattggtgacaatgcatttgctgggttgccaccaaccgcccaagtagcgcaccaagaggccgaatatttggccaagaattttgataaaatggctcaaataccaaatttccaaaagaatctatcttcaagaaaggataaaattgatctcttgttcgaggagaacaactttaaacctttcaaatacaacgatttaggtgccttagcatacctgggatccgaaagggccattgcaaccatacgttccggtaagagaacattttacaccggtggtggcttaatgaccttctacttatggagaattttgtacttgtccatgattctatctgcaagatcgagattaaaggtctttttcgactggattaaattagcatttttcaaaagagacttttttaaaggattatag

SEQ ID NO: 261 - DNA, 1542 bp, Artificial Sequence
  source: /note="Description of Artificial Sequence: Synthetic polynucleotide"
atgctatcgaagaatttgtatagtaacaagaggttgctcacctcgacgaatacgctagtcagattcgcttccaccagatccacaggggtggaaaactccggagcaggtcctacatcttttaagaccatgaaagtcattgaccctcagcacagcgacaaaccaaacgtgctgatactgggttcggggtggggagctatttcgtttttaaagcacattgacaccaagaagtacaacgtttccatcatctctcctagaagctatttcttatttacgcctttgttaccttctgcaccagttgggacagtagacgaaaagtcaattattgagcccatcgttaattttgctctcaagaaaaaggggaacgttacctactatgaggcagaagccacctctatcaatcccgacaggaataccgttaccataaaatcattatctgccgttagccagctataccaacctgaaaaccatctagggctgcatcaagcagaacctgctgaaattaagtacgattatttaatcagtgctgtaggtgcggaacctaacacatttggtattcctggggtcactgattacggtcatttcctggaggaaattcccaactctttggaaataagaagaacttttgccgccaatctagagaaggctaacttattgccaaagggtgatcccgaaagaagaagactactgtccattgtcgtggttggtggtgggcctactggtgtagaggccgctggtgaactacaggattatgttcaccaggacctgagaaagtttctccctgcattggccgaagaagtccaaattcacttggtcgaagctctgcccatcgttttgaatatgtttgagaaaaagctttcatcatacgcgcaatcacatttagaaaacacttcgatcaaagtacatctgagaacggctgtcgccaaagttgaagaaaagcaattgttggcaaagaccaaacacgaagacggtaaaataaccgaagaaactattccatacggtactttgatttgggccacgggtaacaaggcaagaccggtaatcactgaccttttcaagaaaattcctgagcaaaactcgtccaagagaggattggcagtgaatgactttttgcaggtgaaaggcagcaacaacattttcgccattggtgacaatgcatttgctgggttgccaccaaccgcccaagtagcgcaccaagaggccgaatatttggccaagaattttgataaaatggctcaaataccaaatttccaaaagaatctatcttcaagaaaggataaaattgatctcttgttcgaggagaacaactttaaacctttcaaatacaacgatttaggtgccttagcatacctgggatccgaaagggccattgcaaccatacgttccggtaagagaacattttacaccggtggtggcttaatgaccttctacttatggcagattttgtacttgtccatgattctatctgcaagatcgagattaaaggtctttttcgactggattaaattagcatttttcaaaagagacttttttgagggattatag

SEQ ID NO: 262 - DNA, 1542 bp, Artificial Sequence
  source: /note="Description of Artificial Sequence: Synthetic polynucleotide"
atgctatcgaagaatttgtatagtaacaagaggttgctcacctcgacgaatacgctagtcagattcgcttccaccagatccacaggggtggaaaactccggagcaggtcctacatcttttaagaccatgaaagtcattgaccctcagcacagcgacaaaccaaacgtgctgatactgggttcggggtggggagctatttcgtttttaaagcacattgacaccaagaagtacaacgtttccatcatctctcctagaagctatttcttatttacgcctttgttaccttctgcaccagttgggacagtagacgaaaagtcaattattgagcccatcgttaattttgctctcaagaaaaaggggaacgttacctactatgaggcagaagccacctctatcaatcccgacaggaataccgttaccataaaaaacttatctgccgttagccagctataccaacctgaaaaccatctagggctgcatcaagcagaacctgctgaaattaagtacgattatttaatcagtgctgtaggtgcggaacctaacacatttggtattcctggggtcactgattacggtcatttcctgaaggaaattcccaactctttggaaataagaagaacttttgccgccaatctagagaaggctaacttattgccaaagggtgatcccgaaagaagaagactactgtccattgtcgtggttggtggtgggcctactggtgtagaggccgctggtgaactacaggattatgttcaccaggacctgagaaagtttttccctgcattggccgaagaagtccaaattcacttggtcgaagctctgcccatcgttttgaatatgtttgagaaaaagctttcatcatacgcgcaatcacatttagaaaacacttcgatcaaagtacatctgagaacggctgtcgccaaagttgaagaaaagcaattgttggcaaagaccaaacacgaagacggtaaaataaccgaagaaactattccatacggtactttgatttgggccacgggtaacaaggcaagaccggtaatcactgaccttttcaagaaaattcctgagcaaaactcgtccaagagaggattggcagtgaatgactttttgcaggtgaaaggcagcaacaacattttcgccattggtgacaatgcatttgctgggttgccaccaaccgcccaagtagcgcaccaagaggccgaatatttggccaagaattttgataaaatggctcaaataccaaatttccaaaagaatctatcttcaagaaaggataaaattgatctcttgttcgaggagaacaactttaaacctttcaaatacaacgatttaggtgccttagcatacctgggatccgaaagggccattgcaaccatacgttccggtaagagaacattttacaccggtggtggcttaatgaccttctacttatggagaattttgtacttgtccatgattctatctgcaagatcgagattaaaggtctttttcgactggattaaaatggcatttttcaaaagagacttttttaaaggattatag

SEQ ID NO: 263 - DNA, 1542 bp, Artificial Sequence
  source: /note="Description of Artificial Sequence: Synthetic polynucleotide"
atgctatcgaagaatttgtatagtaacaagaggttgctcacctcgacgaatacgctagtcagattcgcttccaccagatccacaggggtggaaaactccggagcaggtcctacatcttttaagaccatgaaagtcattgaccctcagcacagcgacaaaccaaacgtgctgatactgggttcggggtggggagctatttcgtttttaaagcacattgacaccaagaagtacaacgtttccatcatctctcctagaaagtatttcttatttacgcctttgttaccttctgcaccagttgggacagtagacgaaaagtcaattattgagcccatcgttaattttgctctcaagaaaaaggggaacgttacctactatgaggcagaagccacctctatcaatcccgacaggaataccgttaccataaaatcattatctgccgttagccagctataccaacctgaaaaccatctagggatgcatcaagcagaacctgctgaaattaagtacgattatttaatcagtgctgtaggtgcggaacctaacacatttggtattcctggggtcactgattacggtcatttcctgaaggaaattcccaactctttggaaataagaagaacttttgccgccaatctagagaaggctaacttattgccaaagggtgatcccgaaagaagaagactactgtccattgtcgtggttggtggtgggcctactggtgtagaggccgctggtgaactacaggattatgttcaccaggacctgagaaagtttctccctgcattggccgaagaagtccaaattcacttggtcgaagctctgcccatcgttttgaatatgtttgagaaaaagctttcatcatacgcgcaatcacatttagaaaacacttcgatcaaagtacatctgagaacggctgtcgccaaagttgaagaaaagcaattgttggcaaagaccaaacacgaagacggtaaaataaccgaagaaactattccatacggtactttgatttgggccacgggtaacaaggcaagaccggtaatcactgaccttttcaagaaaattcctgagcaaaactcgtccaagagaggattggcagtgaatgactttttgcaggtgaaaggcagcaacaacattttcgccattggtgacaatgcatttgctgggttgccaccaaccgcccaagtagcgcaccaagaggccgaatatttggccaagaattttgataaaatggctcaaataccaaatttccaaaagaatctatcttcaagaaaggataaaattgatctcttgttcgaggagaacaactttaaacctttcaaatacaacgatttaggtgccttagcatacctgggatccgaaagggccattgcaaccatacgttccggtaagagaacattttacaccggtggtggcttaatgaccttctacttatggagaattttgtacatgtccatgattctatctgcaagatcgagattaaaggtctttttcgactggattaaattagcatttttcaaaagagacttttttaaaggattatag

SEQ ID NO: 264 - DNA, 1542 bp, Artificial Sequence
  source: /note="Description of Artificial Sequence: Synthetic polynucleotide"
atgctatcgaagaacttgtacagtaacaagaggttgctcacctcgaccaatacgctagtgagattcgcttccaccagatccacaggggtggaaaactccggggcaggccctacatctttcaagaccatgaaagtcattgaccctcagcacagcgacaaaccaaacgtgctgatactgggttcggggtggggagctatctcgtttttaaagcacattgacaccaagaagtacaacgtttccatcatcagccccagaaagtatttcttatttacgcctttgttaccttctgcaccagttgggacagtggacgaaaagtccattatcgagcccatcgtgaattttgctctcaagaaaaagggcaacgttacctactatgaggcagaagccaccagcatcaatcccgacaggaacaccgtgaccataaagagcctgagcgccgtgagccagctgtaccagcctgaaaaccatctagggctgcaccaagcagagcccgctgaaattaagtacgattatttaatcagtgctgtaggcgcggaacccaacacatttggaattcctggggtgactgactacggtcatttcctgaaggaaattcccaactctctggaaataagaagaacttttgccgccaacctagaagaggccaacctgttgcctaagggcgatcccgaaagaagaagactactgtccatcgtggtggttggtggtggccctactggcgtagaagccgctggcgagctgcaggattatgttcaccaggacctgagaaagtttctccctgccctggccgaggaagtccagattcacttggtcgaagccctgcccatcgtgttgaatatgtttgagaaaaagctttcaagctacgcccagtcacatttagaaaacacttcgatcaaagtacacctgagaacggccgtcgccaaagttgaagaaaagcaactgctggccaagaccaaacacgaagacggtaaaataaccgaggaaactatcccatacggtaccctgatttgggccacgggtaacaaggcaagaccggtaatcaccgacctgttcaagaaaattcccgagcagaactcgtccaagagaggcttggcagtgaacgactttttgcaggtcaaaggcagcaacaacattttcgccattggcgacaatgcatttgccgggttgccaccaacagcccaagtagcgcaccaagaggccgaatatttggccaagaattttgacaaaatggctcaaataccaaatttccaaaagaacctgtcctccagaaaggataaaattgacctgttgttcgaggagaacaacttcaaacccttcaagtacaacgacttaggtgccttagcatacctgggatccgaaagagccattgcaaccatccgttccggcaagagaacattctacaccggtggtggcctgatgaccttctacttatggcggattttgtacctgtccatgattctgtctgcacgcagcagactgaaggtcttcttcgactggattaaattagcattcttcaaaagagacttttttgagggattatag

SEQ ID NO: 265 - DNA, 1542 bp, Artificial Sequence
  source: /note="Description of Artificial Sequence: Synthetic polynucleotide"
atgctatcgaagaatttgtacagtaacaagaggttgctgaccagcacgaacaccctagtcagattcgcctccaccagatccacaggcgtcgaaaacagcggagcaggtcccacatctttcaagaccatgaaagtcattgaccctcagcacagcgacaaaccaaacgtgctgatactgggttcgggctggggcgctatttcgtttttaaagcacattgacaccaagaagtacaacgtcagcatcatctctcccagaaagtatttcctgtttacgcctttgttacctagcgcaccagtggggacagtagacgaaaagtcaatcattgagcccatcgttaattttgctctcaagaaaaaggggaacgttacctactatgaggcagaagccacctctatcaatcccgacaggaataccgttaccatcaagagcttatctgccgtttcccagctataccagcctgaaaaccatctggggctgcaccaagccgaacccgccgaaattaagtacgactatttaatcagtgccgtaggtgcggaacctaacacctttggtattcctggggtgaccgactacggtcatttcctgaaggaaattcccaactctctggaaatacggagaacctttgccgccaatctagaggaggccaacttactgccaaagggtgatcccgaacggagaagactactgtccatcgtcgtggttggtggtgggcctactggtgtagaggccgctggtgaactgcaggattatgtgcaccaggacctgagaaagtttttccccgcattggccgaagaagtgcagattcacttggtcgaagccctgcccatcgttttgaatatgtttgagaagaagctttcaagctacgcgcagtcacatttagaaaacacttcgatcaaagtgcacctgagaacggctgtcgccaaggtggaagaaaagcaactgctggcaaagaccaaacacgaggacggtaagattaccgaggaaactattccctacggcactttgatttgggccacgggtaacaaggccagacccgtaatcactgaccttttcaagaaaattcctgagcaaaacagctccaagagaggcttggcagtgaatgactttttgcaggtgaaaggcagcaacaacattttcgccattggtgacaatgcatttgccggcctgccacctacagcccaagtggcccaccaagaggccgagtacttggccaagaacttcgataaaatggctcaaataccaaatttccagaagaatctatcttcaagaaaggataaaattgacctcttgttcgaggaaaacaactttaagcctttcaaatacaacgatctgggtgccttagcctacctgggatccgaaagggccattgcaaccatcagatccggtaagagaaccttttacaccggtggaggcttaatgaccttctacttatggcggatcctgtacttgagcatgattctaagcgccagatcgagattaaaggtgtttttcgactggattaagttagcatttttcaaaagagactttttcaaaggattatga

SEQ ID NO: 266 - DNA, 1542 bp, Artificial Sequence
  source: /note="Description of Artificial Sequence: Synthetic polynucleotide"
atgctatcgaagaatttgtacagcaaccggcggttgctcacctcgacgaatacgatggtccgcttcgcctccaccagatccacaggcgtggaaaactccggagcaggtcctacaagctttaagaccatgaaagtcatcgaccctcagcacagcgacaaaccaaacgtgctgatactgggttcggggtggggagctatttcgtttctgaagcacattgacaccaagaagtacaacgtttccatcatctctcctagaagctatttcctgtttacgcctttgttaccttctgccccagttgggacagtagacgaaaagtccattatcgagcccatcgttaattttgctctgaagaaaaaggggaacgtcacctactatgaggcagaggccacctctatcaatcccgacaggaacaccgtgaccataaaatcactgtctgccgtgtcccagctataccaacctgagaaccatctagggctgcaccaagccgaacctgccgagattaagtacgattatttaatcagcgctgtaggtgccgagcctaacacatttggtatccccggcgtcactgattacggccatttcctgaaagaaatccccaacagcttggaaatccggagaactttcgccgccaatctagagaaggctaacctgttgcctaagggtgaccccgaacggagaaggctactgtccatcgtggtcgttggtggtgggcccacaggtgtggaggccgctggcgagctgcaggattatgtgcaccaggacctgagaaagttcctccctgccttggccgaagaagtccaaattcacttggtcgaagccctgcccatcgtgttgaatatgtttgagaaaaagctgtcatcatacgcgcaatcacatttagaaaacacctccatcaaagtacatctgagaaccgctgtcgccaaggttgaagagaagcaactgctggccaagaccaaacacgaagacggtaaaataaccgaagaaactattccatacggtaccttgatttgggccacgggtaacaaggcaagaccggtaatcaccgacctgttcaagaaaattcctgagcaaaactcgagcaagagaggattggcagtgaatgacttcttgcaggtgaaaggcagcaacaacattttcgccattggtgacaacgcctttgctggcctgccaccaaccgcccaggtggcgcaccaggaggccgaatatttggccaagaatttcgacaaaatggcccaaatcccaaatttccaaaagaatctatcttccagaaaggataaaattgatctgttgttcgaggagaacaactttaaacctttcaaatacaacgatttaggtgccctggcatacctgggctccgaaagggccattgcaaccatccgttccggtaagagaaccttctacaccggtggtggcctgatgaccttctacttatggagaattttgtacctgtccatgattctatctgcaagaagcagattaaaggtgtttttcgactggattaagctggcatttttcaagagggacttttttgagggactgtga

SEQ ID NO: 267 - DNA, 1542 bp, Artificial Sequence
  source: /note="Description of Artificial Sequence: Synthetic polynucleotide"
atgctaagcaagaatttgtatagcaacaagcggttgctcacctcgacgaatacgctcgtccgcttcgcttccaccagatccacaggggtcgaaaacagcggagcaggtcccaccagctttaagaccatgaaagtcattgaccctcagcacagcgacaaacccaacgtgctgatactgggttcggggtggggagctattagctttctgaagcacattgacaccaagaagtacaacgtctccatcatctctcccagaagctatttcttacacacgcctttgctgcctagcgcacctgttggaacagtagacgagaagtcaatcattgagcccatcgttaattttgctctgaagaaaaaggggaacgttacctactatgaggcagaagccacctctatcaatcccgacaggaataccgttaccataaaatcattaagcgccgttagccagctgtaccagcctgaaaaccatctagggctgcaccaagcagaacctgccgaaattaagtacgattacctgatcagtgctgtaggcgcggagcctaacacctttggaattcctggggtgactgattacggtcacttcctgaaagaaattcccaactctttggaaatcagaagaacttttgccgccaatctagagaaggctaacctgctgccaaagggcgaccccgaacggagaagactactgtccattgtcgtggttggtggtgggcccactggtgtagaggccgctggcgagctgcaggattatgtgcaccaggacctgagaaagtttctccctgcattggccgaagaagtccaaattcacttggtcgaagccctgcccatcgtgttgaatatgttcgagaaaaagctgtcatcatacgcgcagtcacatttagaaaacacttccatcaaggtgcacctgagaacggccgtcgccaaggttgaagagaagcagctgttggccaagaccaaacacgaggacggtaaaataaccgaagaaaccattccatacggtaccttgatttgggccacgggtaacaaggccagaccggtaatcactgaccttttcaagaaaatccctgagcaaaactcgagcaagagaggattggcagtgaatgacttcttgcaggtcaaaggcagcaacaacatcttcgccattggcgacaatgcatttgctgggttgccaccaacagcccaagtagcgcaccaagaggccgagtatctggccaagaattttgataaaatggctcaaataccaaatttccaaaagaacctgtcctcacggaaggataaaattgacctgttgttcgaggagaacaacttcaaacctttcaaatacaacgacctgggcgccttagcatacctgggatccgaaagagccattgcaaccataagatccggcaagagaaccttctacaccggtggtggcttaatgaccttctacttatggcagattttgtacatgtccatgatcctatctgcccgctcgagattaaaggtctttttcgactggattaaattagcattcttcaagagggactttttcaagggattatga

SEQ ID NO: 268 - DNA, 1542 bp, Artificial Sequence
  source: /note="Description of Artificial Sequence: Synthetic polynucleotide"
atgctgtcgaagaacttgtacagtaacaagcggttgctcaccagcacgaatacgctcgtccgcttcgcttccaccagatccacaggggtggaaaactccggagcaggtcctacatcttttaagaccatgaaagtcattgaccctcagcacagcgacaaaccaaacgtgctgatactgggttctgggtggggcgccatctcgtttttaaagcacattgacaccaagaagtacaacgtttccatcatctctcccagaagctatttcttatttacgcccttgctgccctctgcaccagtgggaaccgtagacgaaaagtcaatcattgagcccatcgttaattttgctctcaagaaaaaggggaacgtcacctactatgaggcagaagccacctctatcaaccccgacaggaataccgttaccatcaagagcttatctgccgtgagccagctgtaccagcctgaaaaccatctaggcatgcatcaggcagaacctgctgaaattaagtacgactacttaatcagtgctgtaggtgcggaacctaacacatttggtattcctggcgtcactgactacggccacttcctgaaggaaatccccaactctttggaaataagacggacttttgccgccaacctagaggaggctaacttattgccaaagggtgatcccgagagaagaagactgctgtccattgtcgtggtgggtggagggcccacaggcgtagaggctgctggcgaactacaggattacgttcaccaggacctgagaaagtttctccccgcactggccgaagaagtccaaattcacttggtcgaagctctgcccatcgtgctgaatatgtttgagaaaaagctgtcatcatacgcgcaatcacatctggaaaacacttccatcaaggtgcatctgagaacggctgtggccaaagttgaagaaaagcaattgttggcaaagaccaaacacgaagacggtaagattaccgaagaaactattccatacggcactttgatttgggccacgggcaacaaggccagaccggtaatcactgaccttttcaagaaaattcctgagcaaaacagcagcaagagaggactggcagtgaatgactttttgcaggtgaaaggcagcaacaacattttcgccattggtgacaatgcatttgctggcttgcctcctaccgcccaagtagcccaccaagaggccgagtatatcgccaagaactttgataaaatggctcaaatacccaatttccagaagaacctatcctcaagaaaggataagatcgacctcctgttcgaggagaacaacttcaagcctttcaagtacaacgatttaggcgccttagcatacctgggctccgaaagagccattgcaaccataagatccggcaagagaaccttttacaccggtggtggcctgatgaccttctacttatggagaattttgtacttgtccatgattctatctgcccgcagcagattaaaggtctttttcgactggatcaagttagcctttttcaaaagggacttctttaaaggactgtag

SEQ ID NO: 269 - DNA, 1542 bp, Artificial Sequence
  source: /note="Description of Artificial Sequence: Synthetic polynucleotide"
atgctatcgaagaatttgtacagcaaccggcggctgctcacctcgacgaacaccctcgtcagattcgcctccaccagatccacaggggtggaaaacagcggagcaggtcctacctcttttaagaccatgaaagtcatcgacccccagcacagcgacaagcccaacgtgctgatactgggttctgggtggggcgccatttcgtttttaaagcacatcgacaccaagaagtacaacgtttccatcatctctcccagaagctatttcttatttacgcctctgttaccttctgccccagttgggacagtagacgagaagtccattattgagcccatcgtgaattttgctctcaagaaaaagggcaacgttacctactatgaggccgaagccaccagcatcaatcccgacaggaacaccgttaccataaaatcattaagcgccgtgagccagctataccagcctgaaaaccatctggggctgcaccaagccgaacctgctgaaattaagtacgattacttaatcagcgctgtaggcgcggagcctaacacatttggaatccctggcgtgactgattacggtcacttcctgaaggagatccccaacagcctggaaataagaagaacttttgccgccaatctagaggaggctaacttattgccaaagggtgatcccgaacggagaagactactgagcattgtggtggttggtggagggcctactggtgtagaagccgctggtgaactacaggattatgttcaccaggacctgagaaagtttctccccgcattggccgaagaagtccaaattcacctggtcgaagccctgcccatcgttttgaacatgtttgagaaagagcttagctcatacgcccaatcacatttagaaaacacctccatcaaagtgcatctgagaaccgccgtggccaaggtggaagagaagcaattgttggcaaagaccaaacacgaagacggtaaaataaccgaagaaactattccatacggtaccctgatttgggccacgggtaacaaggcaagacccgtaatcaccgacctgttcaagaagattcccgagcaaaactcgagcaagcggggattggcagtgaatgacttcttgcaggtgaaaggcagcaacaacatcttcgccattggcgacaatgcatttgctggcttgcctcctaccgcccaggtagcgcaccaagaggccgaatatttggccaagaactttgataagatggctcaaatacccaatttccaaaagaacctatcctcaagaaaggataaaattgatctcttgttcgaggaaaacaactttaaacctttcaaatacaacgatttaggtgccttagcatacctgggaagcgaaagggccattgcaaccatcagatccggcaagagaacattttacaccggtggtggcctgatgaccttctacttatggagaattttgtacttgtccatgattctgtctgccagatcgagattaaaggtctttttcgactggatcaagttagcatttttcaagagagacttttttaaaggactgtag

SEQ ID NO: 270 - DNA, 1542 bp, Artificial Sequence
  source: /note="Description of Artificial Sequence: Synthetic polynucleotide"
atgctgagcaagaacttgtatagtaacaagaggctgctcacctcgaccaatacgctcgtcagattcgctagcaccagatccacaggcgtcgaaaacagcggagcaggccctacatcttttaagaccatgaaagtcattgacccccagcacagcgacaaaccaaacgtgctgatcctgggttcggggtggggagccatttcgtttctgaagcacattgacaccaagaagtacaacgtctccatcatcagccccagaagctacttcctgcacacccccttgttaccctctgcacctgttgggacagtagacgaaaagtcaattattgagcccatcgttaatttcgccctcaagaaaaaggggaacgttacctactatgaggcagaagccacctctatcaatcccgacaggaataccgttaccataaaaagcttatctgccgtttcccagctgtaccaacctgagaaccatctggggctgcatcaagcagaacccgctgaaattaagtacgattacttaatcagcgctgtaggtgcggaacccaacacatttggtattcccggggtgactgactacggtcacttcttcaaggaaatccccaactctttggaaatacggagaacttttgccgccaatctggagaaggctaacttactgccaaagggcgaccccgaaagaagaagactactgtccattgtcgtcgtgggtggtggccccactggtgtagaggctgctggtgagctacaggattatgttcaccaggacctgagaaagttcctgcctgcattggccgaagaagtccaaattcacttggtcgaagctctgcccatcgtgttgaatatgttcgagaagaagctgtcatcatacgcgcaatcacatctggaaaacacttccatcaaagtacatctgagaacggctgtcgccaaagttgaagagaagcaattgctggcaaagaccaaacacgaagacggtaaaataaccgaggaaactatcccctacggcaccttgatttgggccaccggtaacaaggcaagaccggtaatcactgaccttttcaagaaaatccccgagcaaaactcgtccaagagaggattggcagtgaatgactttttgcaggtgaaaggcagcaacaacattttcgccatcggcgacaatgcatttgccgggttgccaccaaccgcccaggtagcgcaccaggaagccgaatatctggccaagaactttgataaaatggctcagatacccaatttccaaaagaacctatcctcacggaaggataagatcgatctcttgttcgaggagaacaactttaaacctttcaaatacaacgatctgggcgccttagcatacctgggaagcgaaagagccattgcaaccatacgttccggtaagagaacattttacaccggtggtggcttaatgaccttctacttatggagaatcttgtacatgagcatgattctatctgccagatcgagattaaaggtctttttcgactggatcaagctggcctttttcaagagagactttttcaaaggcttatag

SEQ ID NO: 271 - DNA, 1542 bp, Artificial Sequence
  source: /note="Description of Artificial Sequence: Synthetic polynucleotide"
atgctgtcgaagaatttgtatagcaacaagaggttgctcacctcgaccaatacgctagtcagattcgcttccaccagatccaccggggtggaaaactccggggcaggtcctacatcttttaagaccatgaaagtcattgacccccagcacagcgacaaaccaaacgtgctgatcctgggttctggctggggagccatctcgtttttaaagcacattgacaccaagaagtacaacgtttccatcatctctcctagaaagtatttcctgcacacgcctttgttaccttctgcaccagtgggaaccgtggacgaaaagtcaattattgagcccatcgttaattttgctctcaagaaaaaggggaacgttacctactacgaggcagaggccaccagcatcaatcccgaccggaacaccgtgaccatcaaatcattaagcgccgtgagccagctgtaccagcctgaaaaccacctaggcctgcatcaagcagaacccgctgaaattaagtacgattatttaatcagtgctgtgggtgcggaacctaacacctttggtatccccggggtcactgattacggtcatttcctgaaggaaattcccaactctctggaaatcagacggactttcgccgccaacctagagaaggccaacttattgccaaagggtgatcccgagcggagaagactactgtccattgtcgtcgtgggtggtgggcctactggtgtagaggccgctggcgagctacaggattacgttcaccaggacctgcggaagttcctccccgcattggccgaagaagtccagattcacttggtcgaagctctgcccatcgttctgaatatgtttgagaaaaagctttcatcatacgcgcaaagccatttagaaaacacttccatcaaagtacatctgagaaccgccgtcgccaaggtggaagagaagcaattgttggcaaagaccaaacacgaggacggtaaaattaccgaagaaactattccatacggcactttgatttgggccacgggcaacaaggcaagacccgtgatcaccgacctgttcaagaagattcctgagcaaaactcgagcaagagaggattggcagtgaatgactttttgcaggtcaaaggcagcaacaacattttcgccattggtgacaatgcatttgccgggctgccaccaacagcccaagtggcccaccaagaggccgagtatttggccaagaattttgacaaaatggcccagataccaaatttccaaaagaatctgtcttcaagaaaggataagattgatctcctgttcgaggaaaacaactttaaacccttcaaatacaacgatttaggtgccttagcatacctgggatccgaaagggccattgcaaccataagaagcggtaagcggaccttttacaccggtggtggcttaatgaccttctacttatggagaatcctgtacatgagcatgattctaagcgccagatcgagactgaaggtcttcttcgactggatcaagttagcctttttcaaaagagacttttttaaaggattatag

SEQ ID NO: 272 - DNA, 1542 bp, Artificial Sequence
  source: /note="Description of Artificial Sequence: Synthetic polynucleotide"
atgctatcgaagaatctgtatagtaaccggaggttgctgaccagcaccaataccctagtcagattcgcctccaccagatccacaggcgtggaaaactccggagctggccctacctcttttaagaccatgaaagtcatcgaccctcagcacagcgacaaaccaaacgtgctgatactgggttctgggtggggagccatctcgtttttaaagcacattgacaccaagaagtacaacgtttccatcatctctcctagaagctatttcttacacacgcccctgctgccttctgcccctgttgggacagtagacgaaaagtcaattatcgagcccatcgttaactttgctctcaagaaaaaggggaacgtcacctactacgaggcagaagccaccagcatcaatcccgacaggaataccgttaccatcaaaagcttaagcgccgtgtcccagctgtaccagcccgagaaccacctagggctgcatcaagcagaacctgccgaaattaagtacgattatttaatcagcgctgtaggcgccgaacccaacacatttggaatccctggggtcaccgattacggccatttcctgaaggaaatccccaacagcttggaaataagacggaccttcgccgccaatctagagaaggctaacttattgccaaagggtgaccccgaaagaagaaggctactgtccattgtcgtcgtgggcggtggccctacaggtgtggaagccgctggcgaactacaggactatgttcaccaggacctgagaaagttcctccctgcattggccgaggaagtccaaattcacttggtcgaagccctgcccatcgttttgaacatgtttgagaagaagctttcatcatacgcccaatcacatttagaaaacacctcgatcaaagtacacctgagaacggctgtcgccaaagtggaagaaaagcagttgttggcaaagaccaagcacgaagacggtaaaataaccgaggaaactattccatacggcactttgatttgggccaccggcaacaaggcaagaccggtaatcactgaccttttcaagaagattcccgagcagaactcgtccaagagaggactggcagtgaatgactttctgcaggtgaaaggcagcaacaacattttcgccattggtgacaatgcatttgccgggctgccaccaacagcccaagtggcgcaccaagaggccgaatatttggccaagaatttcgataaaatggctcagataccaaatttccaaaagaatctatcttcaagaaaggataaaattgatctcttgttcgaggagaacaactttaaacccttcaaatacaacgacttaggtgccttagcatacctgggctccgaaagggccattgcaaccataagatccggcaagagaacattttacaccggtggtggcttaatgaccttctacttatggcggatcctgtacctgtccatgatcctaagcgcaagatcgagattaaaggtctttttcgactggattaagttagcatttttcaaaagagacttctttgagggactgtag

SEQ ID NO: 273 - DNA, 1542 bp, Artificial Sequence
  source: /note="Description of Artificial Sequence: Synthetic polynucleotide"
atgctatcgaagaacttgtacagtaacaagaggttgctcacctcgacgaacaccctagtcagattcgcctccaccagatccacaggggtcgaaaactccggggcaggtcctacaagcttcaagaccatgaaagtcatcgaccctcagcacagcgacaaaccaaacgtgctgatcctgggttcgggctggggcgccatctcgtttttaaagcacattgacaccaagaagtacaacgttagcatcatcagccctagaaagtatttcttatttacgcccctgctgcctagcgcccctgttggaacagtagacgaaaagtcaatcattgagcccatcgttaatttcgctctcaagaaaaagggcaacgttacctactatgaggcagaggccacctctatcaaccccgaccggaacaccgttaccataaagtcattatctgccgttagccagctataccaacctgaaaaccatctaggcctgcaccaagcagaacctgctgaaattaagtacgattatttaatcagtgctgtaggcgcggaacctaacacatttggtatccctggcgtcaccgattacggccacttcctggaggaaattcccaactctttggaaataagacggacttttgccgccaatctagagaaggctaacttattgccaaagggtgatcccgaaagaagaaggctactgagcattgtcgtggttggtggtgggcctactggcgtagaggccgctggtgagctacaggattacgtgcaccaggacctgagaaagtttctgcctgccttggccgaggaagtgcaaattcacctggtcgaagctctgcccatcgttttgaacatgtttgagaaaaagctttcatcatacgcccagtcacatttagaaaacacctcgatcaaagtgcacctgagaacggctgtcgccaaggttgaagaaaagcaattgttggcaaagaccaagcacgaagacggtaaaataaccgaggaaaccatcccctacggtaccttgatttgggccacgggtaacaaggcaagaccggtaatcaccgacctgttcaagaaaatccctgagcaaaactcgtccaagcggggattggcagtgaatgactttttgcaggtcgagggcagcaacaacattttcgccattggtgacaacgcctttgccggcctgccacctacagcccaagtagcgcaccaggaagccgaatatttggccaagaattttgacaaaatggcccagatacccaatttccaaaagaatctgtcttcacggaaggataaaattgatctcttgttcgaggaaaacaactttaaacctttcaaatacaacgacttaggtgccctggcatacctgggcagcgaaagggccattgcaaccatacgttccggtaagagaacattttacaccggcggaggcctgatgaccttctacttatggagaatcttgtacctgtccatgattctatctgcaagatcgagactgaaggtgtttttcgactggattaagctggcatttttcaaaagagacttttttaaaggcttatag

SEQ ID NO: 274 - DNA, 1542 bp, Artificial Sequence
  source: /note="Description of Artificial Sequence: Synthetic polynucleotide"
atgctatcgaagaatttgtatagtaacaagaggttgctgacctcgaccaacacgctcgtcagattcgcttccaccagatccacaggcgtggaaaactccggagctggccctacctcttttaagaccatgaaagtcatcgaccctcagcacagcgacaaaccaaacgtgctgatactgggttctgggtggggagctattagctttctgaagcacattgacaccaagaagtacaacgtttccatcatctctcctagaagctatttcttattcacgcctctgatgccctctgccccagttggaacagtagacgaaaagtcaattatcgagcccatcgtgaattttgccctcaagaaaaaggggaacgtcacctactatgaggcagaagccacctctatcaatcccgacaggaataccgttaccataaaatcattatctgccgtgagccagctataccagcctgaaaaccacctggggctgcatcaagcagagcctgctgaaattaagtacgactacttaatcagtgctgtaggtgcggaacctaacacatttggaattcccggcgtcactgattacggtcatttcctgaaggagattcccaactctctggaaataagacggacctttgccgccaatctggaaaaggctaacttattgcctaagggcgaccccgaaagaagaagactgctgtccatcgtggtggttggtggtggccccacaggtgtagaggccgctggtgaactgcaggattatgttcaccaggacctgcggaagttcctccctgcactggccgaagaagtgcagattcacttggtcgaagctctgcccatcgttttgaatatgtttgagaaaaagctttcatcatacgcgcaatcacacctggaaaacacttccatcaaagtgcatctgagaaccgccgtcgccaaggttgaagaaaagcagctgctggcaaagaccaaacacgaagacggtaagattaccgaggaaactattccatacggtactttgatttgggccaccggtaacaaggcaagaccggtaatcactgacctgttcaagaagattcccgagcaaaactcgagcaagagaggactggccgtgaatgactttttgcaggtcaaaggcagcaacaacatcttcgccattggtgacaacgcctttagcggcctgcctcctacagcccaagtagcccaccaagaggccgaatatttggccaagaattttgataagatggctcaaataccaaatttccaaaagaatctatcttccagaaaggataaaattgatctcttgttcgaggagaacaactttaaacctttcaaatacaacgacttaggtgccctggcctacctgggatccgaaagggccattgccaccataagatccggtaagagaacattttacaccggtggtggcttaatgaccttctacttatggagaatcttgtacatgtccatgatcctatctgccagaagcagattaaaggtgttcttcgactggattaagttagcctttttcaaaagagacttttttaaaggattatga

SEQ ID NO: 275 - DNA, 1542 bp, Artificial Sequence
  source: /note="Description of Artificial Sequence: Synthetic polynucleotide"
atgctaagcaagaacttgtatagcaacaagaggttgctcaccagcacgaacacgctcgtcagattcgcttccaccagatccaccggggtcgaaaacagcggagcaggtcccacaagctttaagaccatgaaggtcattgaccctcagcacagcgacaaaccaaacgtgctgatcctgggttctggctggggcgctattagctttttaaagcacattgacaccaagaagtacaacgtttccatcatctctcccagaagctatttcctgtttacccctttgttaccttctgcaccagttggaacagtagacgaaaagtccatcattgagcccatcgttaatttcgctctcaagaaaaaggggaacgttacctactatgaggcagaagccacctctatcaatcccgacaggaataccgtgaccataaagtcactgtctgccgttagccagctataccaacctgaaaaccatctagggctgcatcaagccgaacctgctgaaattaagtacgattacctgatcagcgctgtaggtgccgaacccaacacatttggtattcccggggtcaccgactacggtcatttcctgaaggagattcccaactctttggaaatacggagaacttttgccgccaatctagagaaggctaacttactgccaaagggcgaccccgagagaagaagactactgtccattgtggtcgttggtggaggccccactggcgtggaagctgctggtgagctacaggattatgttcaccaggacctgagaaagtttctgcctgcattggccgaagaagtccaaattcacttggtcgaagctctgcccatcgttctgaacatgtttgagaaaaagctttcatcatacgcgcaatcacacctggaaaacacctcgatcaaggtacatctgagaacggctgtcgccaaagttgaagaaaagcaattgttggcaaagaccaagcacgaagacggtaagattaccgaagaaactattccatacggtactctgatttgggccaccggcaacaaggccagaccggtgatcactgacctgttcaagaagatccctgagcaaaacagctccaagagaggactggcagtgaatgactttttgcaggtcaaaggcagcaacaacattttcgccattggtgacaatgcatttagcgggctgccaccaaccgcccaagtagcccaccaggaggccgaatatatcgccaagaatttcgacaagatggcccaaataccaaatttccaaaagaatctgtcctccagaaaggataaaattgacctcttgttcgaggaaaacaacttcaaacctttcaagtacaacgatttaggtgccttagcatacctgggatccgaaagagccattgcaaccatccgttccggcaagagaaccttttacaccggtggtggcttaatgaccttctacttatggagaatcctgtacttgagcatgattctaagcgcacgctcgagattaaaggtctttttcgactggattaaaatggcatttttcaagagagacttcttcaaaggattatag

SEQ ID NO: 276 - DNA, 1542 bp, Artificial Sequence
  source: /note="Description of Artificial Sequence: Synthetic polynucleotide"
atgctatcgaagaatttgtacagtaacaagcggttgctgaccagcacgaatacgctagtcagattcgcctccaccagatccacaggcgtggaaaacagcggagcaggtcctacctctttcaagaccatgaaagtcatcgacccccagcacagcgacaaaccaaacgtgctgatcctgggttcggggtggggcgctatttcgtttctgaagcacatcgacaccaagaagtacaacgtttccatcatctctcctagaagctatttcttatttacccctttgatgccttctgcaccagttgggaccgtagacgaaaagtccattattgagcccatcgttaatttcgccctgaagaaaaaggggaacgtcacctactatgaggccgaggccaccagcatcaatcccgaccggaataccgttaccataaaatcactgtctgccgtgagccagctgtaccaacctgaaaaccacctagggctgcatcaggcagaacccgccgaaattaagtacgattacttaatcagcgctgtaggtgccgagcctaacacatttggaattcctggggtcactgattacggtcatttcctgaaagaaattcccaacagcttggaaataagacggacttttgccgccaatctggagaaggctaacctgctgccaaagggtgatcccgaaagaagaagactgctgtccattgtggtggttggtggtggccctactggtgtagaggctgctggtgaactgcaggattatgttcaccaggacctgagaaagtttctccccgcattggccgaagaagtgcaaattcacctggtcgaagctctgcccatcgttttgaatatgtttgagaaaaagctgtcatcatacgcgcaaagccatttagaaaacacttcgatcaaggtacacctgagaacggccgtcgccaaagttgaagaaaagcaattgttggccaagaccaaacacgaagacggtaagataaccgaagaaactattccatacggtactctgatttgggccacgggtaacaaggcaagaccggtgatcactgaccttttcaagaaaattcccgagcagaactcgagcaagcggggcctggcagtgaatgacttcctgcaggtgaaaggcagcaacaacatcttcgccattggtgacaacgcctttagcgggttgcctcctaccgcccaagtagcgcaccaggaggccgagtatctggccaagaactttgataagatggctcagatcccaaatttccaaaagaatctatcttcaagaaaggataaaattgatctcctgttcgaggagaacaactttaaacctttcaaatacaacgatttaggtgccttagcatacctgggctccgaaagggccattgccaccatcagatccggcaagagaaccttctacaccggtggtggcctgatgaccttctacctgtggcagattttgtacttgtccatgattctgtctgccagaagcagattaaaggtctttttcgactggattaaattagcatttttcaaaagggacttctttaaaggcttatga

SEQ ID NO: 277 - DNA, 1542 bp, Artificial Sequence
  source: /note="Description of Artificial Sequence: Synthetic polynucleotide"
atgctatcgaagaatttgtatagtaacaagaggttgctgaccagcaccaataccctcgtgagattcgccagcaccagatccacaggcgtggaaaactccggggcaggtcccacatctttcaagaccatgaaagtcatcgaccctcagcacagcgacaagcccaacgtgctgatactgggttcggggtggggagctatttcgtttttaaagcacattgacaccaagaagtacaacgtttccatcatcagccctagaagctatttcctgtttacgcccttgttaccttctgccccagtggggacagtagacgagaagtcaattattgagcccatcgtgaacttcgccctgaagaaaaagggcaacgttacctactacgaggccgaagccacctctatcaatcccgaccggaacaccgttaccataaaaaacctgagcgccgtttcccagctataccagcctgaaaaccatctgggcatgcatcaggcagaacccgctgaaattaagtacgattatttaatcagtgctgtaggtgcggagcctaacacctttggtattcccggcgtcactgattacggtcatttcctgaaagaaattcccaactctctggaaataagaagaacttttgccgccaatctagagaaggctaacctgttgccaaagggtgaccccgagagaagaagactgctgagcattgtcgtggtgggtggtgggcctactggtgtagaggccgctggcgaactacaggattacgttcaccaggacctgagaaagtttctccctgcattggccgaggaagtccaaattcacttggtcgaagctctgcccatcgttttgaatatgtttgagaaaaagctttcatcatacgcccaatcacatttagaaaacacttcgatcaaagtgcatctgagaaccgccgtcgccaaggttgaagaaaagcaattgttggcaaagaccaaacacgaggacggcaaaattaccgaagaaactattccctacggtactttgatttgggccaccggtaacaaggcaagaccggtaatcactgaccttttcaagaaaatccctgagcagaactcgagcaagcggggactggccgtgaacgactttttgcaggtgaaaggcagcaacaacattttcgccatcggcgacaatgcatttgccggcctgcctccaaccgcccaagtagcccaccaagaggccgaatatttggccaagaattttgataaaatggcccaaatacccaatttccagaagaatctatcctccagaaaggataaaattgatctcctgttcgaggagaacaactttaagcccttcaaatacaacgacttaggtgccttagcatacctgggatccgaaagggccattgccaccatccgttccggtaagagaacattttacaccggtggtggcttaatgaccttctacttatggagaatcttgtacctgagcatgattctatctgcaagatcgagattaaaggtgtttttcgactggattaaaatggcattcttcaagagggacttctttaaaggactgtag

SEQ ID NO: 278 - DNA, 1542 bp, Artificial Sequence
  source: /note="Description of Artificial Sequence: Synthetic polynucleotide"
atgctaagcaagaatttgtacagtaacaagcggctgctgacctcgaccaatacgctagtgagattcgcctccaccagatccacaggggtcgaaaactccggggcaggtcctacatcttttaagaccatgaaagtcattgaccctcagcacagcgacaaaccaaacgtgctgatactgggttcggggtggggcgctatttcgtttttaaagcacatcgacaccaagaagtacaacgtcagcatcatctctcccagaagctatttcttatttacgcccttgctgccctctgcacctgttgggacagtggacgaaaagtcaatcattgagcccatcgttaattttgctctcaagaaaaaggggaacgtcacctactatgaggccgaagccacctctatcaatcccgacaggaataccgtgaccatcaaaaacttatctgccgtgtcccagctgtaccagcctgaaaaccatctggggatgcaccaggcagaacccgctgaaattaagtacgactatttaatcagtgctgtgggcgccgagcccaacacctttggtattcccggggtcactgattacggtcatttcctgaaggagattcccaactctttggaaataagacggacctttgccgccaacctagaaaaggctaacttactgccaaagggtgatcccgagcggagaagactactgtccattgtcgtcgttggcggtgggcctactggcgtggaggccgctggtgagctacaggattatgtgcaccaggacctgagaaagtttttccctgcattggccgaagaagtccaaattcacttggtggaagctctgcccatcgttttgaatatgttcgagaaaaagctgtcatcatacgcgcaatcacatttagaaaacacttccatcaaagtacatctgagaaccgccgtggccaaagtggaagaaaagcaattgttggccaagaccaaacacgaagacggtaaaataaccgaagaaactatcccctacggtactctgatttgggccacgggtaacaaggccagacccgtaatcactgaccttttcaagaaaatccccgagcaaaactcgtccaagcggggattggccgtgaatgactttttgcaggtgaaaggcagcaacaacatcttcgccattggcgacaacgcatttgccgggttgccacctaccgcccaagtagcgcaccaggaagccgaatatttggccaagaattttgataaaatggcccaaatacccaatttccaaaagaacctatcttcacggaaggataaaattgacctcttgttcgaggagaacaacttcaaacccttcaaatacaacgatttaggtgccctggcctacctgggatccgaaagggccattgcaaccatacgtagcggtaagagaacattttacaccggtggtggcctgatgaccttctacttatggagaatcctgtacttgtccatgattctaagcgcacgctcgagattaaaggtcttcttcgactggattaaattagcattcttcaaaagagacttctttaaaggactgtag

SEQ ID NO: 279 - DNA, 1542 bp, Artificial Sequence
  source: /note="Description of Artificial Sequence: Synthetic polynucleotide"
atgctaagcaagaatctgtacagtaaccggaggttgctcacctcgacgaatacgctagtcagattcgctagcaccagatccacaggggtcgaaaactccggagcaggccctacatcttttaagaccatgaaagtcattgaccctcagcacagcgacaaaccaaacgtgctgatactgggttcggggtggggagctattagctttttaaagcacattgacaccaagaagtacaacgtctccatcatctctcctagaagctatttcttatttacgcccttgttacccagcgcaccagtggggacagtagacgagaagtcaatcattgagcccatcgttaattttgctctcaagaaaaaggggaacgttacctactatgaggcagaagccacctctatcaatcccgaccggaataccgtgaccataaaaaacttaagcgccgtgtcccagctataccaacctgagaaccatctaggcctgcatcaggccgagcccgctgagattaagtacgactacttaatcagtgccgtaggcgccgaacctaacacatttggaattcctggggtgactgattacggtcatttcctgaaggaaattcccaactctttggaaataagaagaacctttgccgccaacctagagaaggctaacttactgccaaagggtgaccccgaaagaagaagactgctgtccattgtggtggtgggtggtgggcctactggtgtagaggccgctggtgaactgcaggattatgttcaccaggacctgagaaagttcttccccgcactggccgaagaagtccaaattcacttggtcgaagccctgcccatcgttctgaatatgtttgagaaaaagctgagctcatacgcccaaagccatctggaaaacacttcgatcaaagtgcatctgagaacggctgtcgccaaagttgaagaaaagcaattgttggccaagaccaaacacgaagacggtaaaataaccgaagaaaccattccatacggcactttgatttgggccacgggcaacaaggcaagaccggtaatcaccgacctgttcaagaaaattcctgagcaaaactcgagcaagcggggcctggccgtgaacgactttttgcaggtgaaaggcagcaacaacattttcgccatcggtgacaatgcatttgccggcttgccaccaaccgcccaagtagcccaccaggaagccgagtatttggccaagaatttcgataaaatggcccaaataccaaatttccagaagaatctatcttcccggaaggataaaatcgatctcttgttcgaggagaacaactttaagcccttcaaatacaacgacctgggtgccttagcctacctgggatccgaaagagccattgcaaccataagatccggtaagcggaccttttacaccggtggtggcctgatgaccttctacctgtggagaattttgtacttgagcatgatcctaagcgcaagatcgagactgaaggtgtttttcgactggatcaaattagcattcttcaagagagacttcttcaagggcttatag

SEQ ID NO: 280 - DNA, 1542 bp, Artificial Sequence
  source: /note="Description of Artificial Sequence: Synthetic polynucleotide"
atgctatcgaagaatttgtatagtaaccggaggttgctcacctcgacgaataccctagtccgcttcgctagcaccagatccacaggggtggaaaactccggagcaggtcctacaagctttaagaccatgaaggtcatcgaccctcagcacagcgacaaaccaaacgtgctgatcctgggttcgggctggggcgctatctcgtttttaaagcacattgacaccaagaagtacaacgttagcatcatctctcctagaagctacttcttattcacccctttgttaccctctgcccctgtggggaccgtggacgaaaagtcaattattgagcccatcgttaatttcgccctcaagaaaaaggggaacgtcacctactatgaggccgaagccacctctatcaaccccgaccggaataccgttaccataaagaacttatctgccgttagccagctgtaccagcctgaaaaccatctagggctgcaccaagcagagcccgctgaaattaagtacgattatttaatcagcgccgtaggcgcggaacccaacacatttggtattcctggggtgaccgattacggtcatttcctgaaggaaattcccaacagcttggaaataagacggactttcgccgccaatctggagaaggctaacttactgccaaagggtgatcccgagagaagaaggctactgtccattgtcgtcgttggcggtgggcccactggtgtagaagccgctggtgaactacaggactatgttcaccaggacctgagaaagttcctgcccgcattggccgaggaagtccagattcacctggtcgaagctctgcccatcgttttgaacatgtttgagaaagagcttagctcatacgcgcaatcacatttagaaaacacttccatcaaagtacacctgagaaccgctgtcgccaaggtggaagaaaagcaattgctggcaaagaccaaacacgaagacggtaaaataaccgaagaaactatcccatacggtaccttgatttgggccacgggtaacaaggcaagaccggtgatcactgaccttttcaagaaaatccctgagcaaaacagctccaagcggggcttggccgtgaatgactttttgcaggtgaaaggcagcaacaacattttcgccattggcgacaatgcctttgccgggttgccacctaccgcccaagtagcgcaccaagaggccgaatatttggccaagaactttgataaaatggctcaaataccaaatttccaaaagaacctgtcttcccggaaggataaaattgacctcttgttcgaggaaaacaacttcaaacctttcaaatacaacgatttaggcgccttagcctacctgggaagcgaaagggccattgcaaccatccgttccggtaagcggaccttttacaccggtggaggcttaatgaccttctacctgtggcggatcctgtacttgagcatgattctaagcgcacgctcgagattaaaggtctttttcgactggattaagttagcatttttcaaaagagacttttttaaaggattatag

SEQ ID NO: 281 - DNA, 1542 bp, Artificial Sequence
  source: /note="Description of Artificial Sequence: Synthetic polynucleotide"
atgctatcgaagaatttgtacagtaacaagaggctgctgacctcgaccaataccatggtcagattcgcttccaccagatccaccggggtggaaaactccggagcaggccctacatcttttaagaccatgaaagtcatcgaccctcagcacagcgacaaaccaaacgtgctgatcctgggttcggggtggggagctatttcgtttctgaagcacattgacaccaagaagtacaacgtcagcatcatctctcctagaaagtatttcttattcacccctttgctgcctagcgcaccagttggaaccgtagacgagaagtcaattatcgagcccatcgttaatttcgctctcaagaaaaaggggaacgttacctactatgaggcagaagccacctctatcaatcccgaccggaacaccgttaccataaaatcattaagcgccgtttcccagctgtaccaacccgaaaaccacctagggctgcaccaagcagaacctgctgaaattaagtacgattatctgatcagtgccgtaggtgccgagcctaacacatttggaattcctggcgtgaccgattacggtcatttcttcaaagagattcccaactctttggaaataagacggacttttgccgccaacctggagaaggctaacttattgccaaagggtgatcccgagagaagaagactgctgagcatcgtcgtggttggcggtggccctacaggtgtagaggctgctggtgaactacaggactatgtgcaccaggacctgagaaagttcctccctgcattggccgaagaagtccaaattcacttggtggaagctctgcccatcgtgctgaatatgtttgagaagaagctgtcatcatacgcgcaatcacacttagaaaacacctcgatcaaagtacatctgagaacggctgtggccaaagtggaagagaagcaattgttggcaaagaccaagcacgaggacggtaagataaccgaagaaaccatcccctacggcactttgatttgggccacgggtaacaaggccagaccggtaatcaccgacctgttcaagaaaattcccgagcagaacagctccaagagaggcctggcagtgaatgactttttgcaggtgaaaggcagcaacaacattttcgccatcggtgacaacgcatttgctgggctgccacctacagcccaagtagcgcaccaagaggccgaatatttggccaagaattttgataagatggcccagatcccaaatttccaaaagaacctatcttcacggaaggataaaattgatctcttgttcgaggaaaacaacttcaaacctttcaagtacaacgatttaggcgccttagcctacctgggatccgaaagggccattgcaaccatacgttccggtaagagaaccttttacaccggtggtggcttaatgaccttctacttatggagaattttgtacttgtccatgattctgtctgccagatcgagattaaaggtctttttcgactggatcaaattagcatttttcaaaagagacttttttaaaggcttatag

SEQ ID NO: 282 - DNA, 1542 bp, Artificial Sequence
  source: /note="Description of Artificial Sequence: Synthetic polynucleotide"
atgctatcgaagaacttgtatagtaacaagaggttgctcaccagcacgaatacgctcgtcagattcgcctccaccagatccacaggggtggaaaactccggagctggtcccacatctttcaagaccatgaaagtcattgaccctcagcacagcgacaagcccaacgtgctgatcctgggttcgggctggggagctattagctttttaaagcacattgacaccaagaagtacaacgtctccatcatcagccccagaagctacttcttacacacgcctttgctgcctagcgccccagttgggacagtagacgaaaagtcaattattgagcccatcgtgaactttgccctgaagaaaaaggggaacgttacctactacgaggcagaggccacctctatcaatcccgacaggaataccgttaccatcaaatcattatctgccgttagccagctgtaccaacctgaaaaccacctaggcatgcaccaagccgaacctgctgagattaagtacgattatttaatcagtgccgtaggtgcggagcctaacacatttggaatccctggggtcaccgattacggtcacttcctgaaagaaattcccaacagcttggaaatcagacggacttttgccgccaatctggagaaggctaacttattgccaaagggtgatcccgagagaagaaggctactgtccattgtggtggttggtggtgggcctactggtgtagaggccgctggcgaactacaggattatgttcaccaggacctgcggaagtttctgcccgccttggccgaagaagtccaaattcacttggtggaagccctgcccatcgttctgaacatgtttgagaaaaagctttcatcatacgcgcaatcacatctggaaaacacttcgatcaaagtacacctgagaaccgctgtcgccaaggttgaagagaagcaattgttggccaagaccaaacacgaagacggtaaaattaccgaagaaactatcccatacggtaccttgatttgggccacgggtaacaaggcaagacccgtgatcaccgaccttttcaagaaaattcccgagcaaaactcgtccaagagaggcttggcagtgaacgactttttgcaggtggagggcagcaacaacattttcgccattggtgacaacgcatttgctgggttgcctccaacagcccaggtagcgcaccaagaggccgaatatctggccaagaattttgacaagatggcccaaataccaaatttccaaaagaacctatcttcaagaaaggataaaatcgatctcctgttcgaggagaacaacttcaaacctttcaagtacaacgatctgggtgccttagcctacctgggatccgaaagggccattgcaaccataagaagcggtaagagaacattctacaccggtggtggcttaatgaccttctacttatggagaattctgtacctgagcatgatcctaagcgccagatcgagattaaaggtgttcttcgactggatcaagttagcatttttcaaaagagacttttttaaaggactgtga

SEQ ID NO: 283 - DNA, 1542 bp, Artificial Sequence
  source: /note="Description of Artificial Sequence: Synthetic polynucleotide"
atgctaagcaagaatttgtatagtaacaagcggctgctgacctcgaccaataccctagtccgcttcgcttccaccagatccacaggcgtggaaaactccggagctggccctaccagctttaagaccatgaaggtcattgacccccagcacagcgacaaacccaacgtgctgatactgggttctggctggggagctatctcgtttctgaagcacattgacaccaagaagtacaacgtcagcatcatctctcctagaagctatttcttacacacgcctttgttaccctctgcaccagttgggacagtagacgagaagtcaattattgagcccatcgtgaattttgctctcaagaaaaaggggaacgttacctactacgaggcagaagccacctctatcaatcccgacaggaataccgttaccataaagaacttaagcgccgtttcccagctgtaccaacctgaaaaccatctagggatgcaccaggccgaacctgctgagattaagtacgattatctgatcagtgctgtaggtgcggaacctaacacatttggtatccctggcgtcactgattacggtcatttcctgaaggagattcccaacagcttggaaataagacggacttttgccgccaatctagagaaggctaacttactgcctaagggtgatcccgagcggagaaggctactgagcattgtggtggtgggtggagggcctactggtgtggaggctgctggtgaactgcaggattacgtgcaccaggacctgcggaagtttctccctgcattggccgaagaagtccaaattcacctggtcgaagctctgcccatcgtgttgaatatgttcgagaaaaagcttagctcatacgcgcagtcacacctggaaaacacttcgatcaaggtgcatctgagaacggctgtcgccaaagtggaagaaaagcaattgctggcaaagaccaagcacgaggacggtaaaataaccgaggaaaccattccctacggcaccttgatttgggccacgggtaacaaggccagacccgtaatcactgaccttttcaagaagatccctgagcagaactcgtccaagagaggattggcagtgaacgactttctgcaggtgaaaggcagcaacaacattttcgccattggtgacaatgcctttgctgggttgccaccaacagcccaagtggcccaccaagaggccgaatatctggccaagaactttgataaaatggcccaaatacccaatttccagaagaatctatcttcaagaaaggataaaattgatctcttgttcgaggaaaacaactttaaacccttcaaatacaacgatttaggtgccttagcctacctgggatccgaaagggccattgcaaccatacgtagcggtaagcggaccttttacaccggcggtggcttaatgaccttctacttatggagaattttgtacttgtccatgattctatctgcaagatcgagattaaaggtctttttcgactggattaaattagcatttttcaaaagggacttctttaaaggactgtga

SEQ ID NO: 284 - DNA, 1542 bp, Artificial Sequence
  source: /note="Description of Artificial Sequence: Synthetic polynucleotide"
atgctatcgaagaatctgtatagtaaccggcggctgctcaccagcacgaataccctcgtgcgcttcgctagcaccagatccacaggggtggaaaactccggggcaggtcccacctcttttaagaccatgaaagtcatcgacccccagcacagcgacaagccaaacgtgctgatcctgggttctgggtggggcgctatcagctttctgaagcacattgacaccaagaagtacaacgtcagcatcatcagccccagaagctacttcctgttcacccctttgatgcctagcgcacctgttgggacagtagacgagaagtcaattatcgagcccatcgtgaacttcgccctgaagaaaaaggggaacgttacctactatgaggccgaggccaccagcatcaaccccgaccggaacaccgtgaccataaaaagcttaagcgccgtgtcccagctgtaccagcccgagaaccacctgggcctgcaccaagcagagcccgccgagattaagtacgactacctgatcagcgccgtgggcgccgaacccaacacctttggaatccctggcgtcaccgattacggccacttcctgaaagaaatccccaacagcttggaaataagaagaaccttcgccgccaacctagaaaaggctaacttactgccaaagggtgaccccgagcggagaaggctgctgagcatcgtcgtggtgggcggagggcctacaggcgtggaagctgctggcgaactacaggactacgtgcaccaggacctgcggaagtttctgcccgcactggccgaggaagtgcagattcacctggtcgaagccctgcccatcgttttgaacatgttcgagaagaagctgtcatcatacgcccaaagccacctggaaaacacctccatcaaggtacatctgagaaccgccgtcgccaaagttgaagaaaagcagctgttggccaagaccaagcacgaagacggtaagattaccgaagaaaccatcccatacggcaccctgatttgggccacgggtaacaaggccagaccggtaatcaccgacctgttcaagaaaattcccgagcaaaactcgtccaagagaggcctggccgtgaatgacttcttgcaggtcgagggcagcaacaacatcttcgccattggtgacaacgcctttgccggcctgccacctaccgcccaggtggcccaccaggaagccgaatacctggccaagaactttgacaaaatggcccagatccccaatttccaaaagaacctatcttccagaaaggataagatcgatctcctgttcgaggaaaacaacttcaaacctttcaaatacaacgatctgggtgccttagcctacctgggatccgaaagagccattgccaccatacgttccggtaagagaacattctacaccggcggaggcctgatgaccttctacttatggagaatcctgtacttgagcatgattctgagcgcacgcagcagactgaaggtgttcttcgactggattaaactggccttcttcaaaagggacttttttaagggcctgtga

SEQ ID NO: 285 - DNA, 1542 bp, Artificial Sequence
  source: /note="Description of Artificial Sequence: Synthetic polynucleotide"
atgctgagcaagaacctgtacagcaacaagcggttgctcacctcgaccaacaccctagtgagattcgccagcaccagatccaccggcgtggaaaactccggggctggtcccaccagctttaagaccatgaaagtcatcgaccctcagcacagcgacaagccaaacgtgctgatcctgggctctgggtggggcgctatcagctttctgaagcacattgacaccaagaagtacaacgttagcatcatcagccccagaaagtacttcttatttacgcccttgctgccctctgcccctgtgggaaccgtggacgaaaagtccatcattgagcccatcgttaatttcgccctgaagaaaaagggcaacgttacctactatgaggccgaagccaccagcatcaaccccgacaggaataccgtgaccatcaagagcttaagcgccgtgtcccagctgtaccagcccgaaaaccatctgggcctgcaccaagccgaacctgctgagattaagtacgattacttaatcagcgccgtaggtgccgagcccaacacctttggaatccccggcgtcactgactacggtcatttcctggaggagattcccaactctctggaaatcagacggaccttcgccgccaatctagagaaggccaacctgctgccaaagggtgatcccgagagaagaaggctgctgagcatcgtggtggtgggcggtgggcctacaggcgtagaggccgctggcgagctgcaggattatgtgcaccaggacctgcggaagttcttccctgcactggccgaggaagtccagattcacttggtcgaagccctgcccatcgtgctgaatatgttcgagaagaagcttagctcatacgcccaaagccatttagaaaacacttccatcaaggtgcacctgagaaccgccgtggccaaggttgaagaaaagcagttgctggcaaagaccaagcacgaagacggtaaaattaccgaggaaaccattccatacggtactctgatttgggccaccggcaacaaggcaagacccgtaatcaccgacctgttcaagaaaattcccgagcagaacagcagcaagagaggcctggcagtgaacgacttcctgcaggtcaaaggcagcaacaacattttcgccatcggcgacaacgcatttgctggcctgcctccaacagcccaagtggcccaccaagaggccgagtatttggccaagaacttcgataaaatggcccagatccccaatttccagaagaacctatcttcccggaaggataagattgacctgttgttcgaggaaaacaactttaagcctttcaagtacaacgatttaggcgccctggcctacctgggaagcgaaagagccattgccaccataagatccggcaagcggacattctacaccggcggtggcctgatgaccttctacttatggcggatcctgtacctgagcatgattctgtctgcccgcagcagactgaaggtgtttttcgactggatcaagctggcctttttcaaaagggacttctttaagggattatag

SEQ ID NO: 286 - DNA, 1542 bp, Artificial Sequence
  source: /note="Description of Artificial Sequence: Synthetic polynucleotide"
atgctgagcaagaatctgtatagtaacaagaggctgctcacctcgaccaacaccctagtgagattcgctagcaccagatccacaggcgtggaaaactccggggcaggccctacctctttcaagaccatgaaggtcatcgacccccagcacagcgacaaaccaaacgtgctgatcctgggttctgggtggggagccatctcgtttttaaagcacatcgacaccaagaagtacaacgtcagcatcatcagccctagaaagtatttcctgttcacccccttgttacccagcgccccagtgggaaccgtagacgagaagtccattattgagcccatcgtgaatttcgctctgaagaaaaaggggaacgttacctactatgaggccgaggccaccagcatcaaccccgaccggaacaccgtgaccataaaatcattaagcgccgtgagccagctgtaccagcctgaaaaccacctgggcctgcaccaggccgaacccgctgagattaagtacgactacttaatcagcgctgtaggtgcggagcccaacacctttggtattcctggcgtgactgattacggccatttcctgaaagaaattcccaactctttggaaatccggcggactttcgccgccaacctggaaaaggctaacttactgcctaagggtgaccccgagagaagaaggctgctgtccatcgtcgtcgtgggcggaggccccactggcgtggaggctgctggtgaactacaggactacgttcaccaggacctgagaaagtttttccctgcactggccgaagaagtgcaaattcacctggtggaagccctgcccatcgtgctgaacatgttcgagaaaaagctgagcagctacgcccaatcacatttagaaaacacctccatcaaagtgcacctgagaacggctgtcgccaaggttgaagaaaagcagttgctggccaagaccaagcacgaggacggcaagataaccgaggaaaccatcccctacggcaccctgatttgggccaccggtaacaaggccagacccgtgatcaccgaccttttcaagaagatccccgagcagaacagcagcaagcggggactggccgtgaacgactttctgcaggtgaaaggcagcaacaacattttcgccatcggcgacaacgcatttgctggcttgccacctaccgcccaagtagcccaccaggaggccgaatatctggccaagaatttcgacaaaatggctcagatacccaatttccaaaagaatctatcctcccggaaggataaaatcgacctcctgttcgaggaaaacaacttcaagcccttcaaatacaacgatctgggcgccctggcctacctgggcagcgaaagagccattgccaccatcagatccggcaagcggacattctacaccggcggaggcttaatgaccttctacctgtggagaatcctgtacttgagcatgattctgagcgcacgcagcagactgaaggtgttcttcgactggattaagctggcattcttcaagagggacttcttcgagggcttatag

SEQ ID NO: 287 - DNA, 1542 bp, Artificial Sequence
  source: /note="Description of Artificial Sequence: Synthetic polynucleotide"
atgctaagcaagaacctgtacagcaacaagaggttgctgaccagcacgaacaccctcgtcagattcgcttccaccagatccacaggcgtcgaaaactccggggctggccctacctctttcaagaccatgaaggtcatcgacccccagcacagcgacaagccaaacgtgctgatcctgggctcgggctggggcgctatcagctttctgaagcacattgacaccaagaagtacaacgtcagcatcatcagccctagaagctacttcctgtttacccctctgctgcctagcgcccctgtgggaaccgtagacgagaagtcaattattgagcccatcgttaacttcgccctgaagaaaaagggcaacgtcacctactatgaggcagaggccacctctatcaaccccgacaggaacaccgtgaccatcaaaagcctgtctgccgtgtcccagctgtaccagcctgaaaaccacctgggcatgcaccaggcagagcccgccgagattaagtacgattacttaatcagcgccgtaggcgccgagcctaacacctttggaattcctggcgtgaccgactacggtcatttcctgaaggaaatccccaactctttggaaataagaagaaccttcgccgccaacctggagaaggccaacttactgcctaagggtgaccccgagcggagaagactactgagcatcgtggtggtgggtggtggccccacaggcgtggaggctgctggcgagctgcaggactacgtgcaccaggacctgcggaagttcctgcccgcattggccgaggaagtccagattcacctggtggaagctctgcccatcgttttgaacatgtttgagaagaagcttagcagctacgcccaaagccacctggaaaacacttccatcaaggtacacctgagaaccgccgtggccaaggtggaagaaaagcaattgctggccaagaccaagcacgaggacggcaaaattaccgaagaaactatcccctacggtaccttgatttgggccaccggcaacaaggccagaccggtaatcaccgacctgttcaagaaaattcccgagcaaaacagcagcaagagaggactggcagtgaacgacttcttgcaggtgaaaggcagcaacaacatcttcgccatcggtgacaatgcatttagcgggctgcctcctaccgcccaagtggcccaccaagaagccgagtacctggccaagaatttcgataagatggctcaaatacccaatttccaaaagaacctatcttcccggaaggataagattgacctcctgttcgaggaaaacaactttaagcccttcaaatacaacgacttaggcgccctggcctacctgggatccgaaagagccattgcaaccatcagaagcggtaagagaacattctacaccggtggaggcctgatgaccttctacttatggagaatcctgtacctgtccatgatcctgagcgccagatcgagattaaaggtctttttcgactggatcaagatggcctttttcaaaagggacttcttcaaaggcttatag

SEQ ID NO: 288 - DNA, 1542 bp, Artificial Sequence
  source: /note="Description of Artificial Sequence: Synthetic polynucleotide"
atgctgtcgaagaatctgtacagcaacaagcggctgctcaccagcaccaacaccctcgtgcgcttcgccagcaccagatccacaggcgtggaaaactccggggctggccccacctcttttaagaccatgaaagtcattgaccctcagcacagcgacaagcccaacgtgctgatcctgggttcggggtggggcgccatttcgtttctgaagcacattgacaccaagaagtacaacgtcagcatcatcagccctagaagctacttcttacacacgcccttgttacccagcgcaccagtgggaacagtggacgagaagtccattatcgagcccatcgttaatttcgccctcaagaaaaagggcaacgtcacctactatgaggccgaagccacctctatcaaccccgacaggaacaccgttaccatcaagagcttaagcgccgtgagccagctgtaccagcccgagaaccatctaggcctgcaccaggccgagcctgccgagattaagtacgactatctgatcagcgccgtgggcgcggagcccaacacatttggtattcccggcgtgaccgattacggccatttcctgaaggagattcccaacagcctggaaatcagaagaaccttcgccgccaatctggaaaaggccaacctgttgccaaagggcgaccccgaacggagaagactgctgagcattgtggtcgtgggcggtggccccacaggtgtggaagccgctggtgagctgcaggactacgttcaccaggacctgagaaagttcctgcccgcattggccgaagaagtgcagattcacctggtcgaagccctgcccatcgtgctgaacatgttcgagaaagagctgagctcatacgcgcaatcacacctggaaaacacttcgatcaaggtacatctgagaaccgccgtcgccaaagtggaagagaagcaactgctggcaaagaccaaacacgaggacggtaaaataaccgaggaaaccattccctacggcaccctgatttgggccaccggcaacaaggcaagacccgtgatcactgaccttttcaagaagatccccgagcaaaactcgtccaagagaggcttggccgtgaacgactttctgcaggtggagggcagcaacaacattttcgccatcggcgacaacgcctttgccggcctgccacctacagcccaagtagcgcaccaagaggccgagtacttggccaagaattttgataaaatggctcagatacccaatttccagaagaacctatcctcaagaaaggataagattgatctcctgttcgaggagaacaacttcaagcctttcaagtacaacgacttaggcgccttagcctacctgggctccgaaagagccattgccaccatccgtagcggcaagcggacattctacaccggcggaggcctgatgaccttctacctgtggagaatcctgtacctgagcatgatcctgtctgcccgcagcagattaaaggtcttcttcgactggatcaagctggccttcttcaaaagggacttttttaagggcttatga

SEQ ID NO: 289 - DNA, 1542 bp, Artificial Sequence
  source: /note="Description of Artificial Sequence: Synthetic polynucleotide"
atgctatcgaagaacttgtatagcaacaagcggctgctgaccagcaccaacaccatggtgagattcgcttccaccagatccacaggggtcgaaaacagcggggctggccctacaagctttaagaccatgaaagtcatcgacccccagcacagcgacaaacccaacgtgctgatactgggctctggctggggcgccatctcgtttttaaagcacattgacaccaagaagtacaacgtcagcatcatcagccctagaagctatttcctgttcacccccctgatgccttctgcccctgtggggacagtagacgagaagtccatcatcgagcccatcgtgaacttcgctctcaagaaaaaggggaacgtcacctactatgaggccgaggccaccagcatcaaccccgacaggaataccgttaccatcaagagcttaagcgccgtttcccagctataccaacctgagaaccacctagggctgcatcaggcagaacccgccgagattaagtacgattatttaatcagcgccgtgggcgccgagcccaacacctttggaatccctggcgtgactgattacggccacttcctgaaagagatccccaacagcctggaaatccggagaaccttcgccgccaatctagagaaggctaacttactgccaaagggcgaccccgagagaagaaggctgctgagcatcgtggtcgttggcggaggccctacaggtgtggaagctgctggtgagctgcaggactacgtgcaccaggacctgagaaagttcctgcccgcactggccgaagaagtgcagattcacctggtggaagccctgcccatcgtgctgaatatgttcgagaaaaagctgagctcatacgcccagtcacacctggaaaacacctcgatcaaagtacacctgagaaccgccgtggccaaggtggaagagaagcagctgctggccaagaccaaacacgaagacggcaaaattaccgaggaaactattccatacggtaccctgatttgggccaccggcaacaaggccagacccgtaatcaccgaccttttcaagaagatccccgagcagaacagcagcaagagaggactggcagtgaacgactttttgcaggtcaaaggcagcaacaacattttcgccatcggtgacaacgcctttgccggcctgcctcctacagcccaggtagcgcaccaggaagccgagtatttggccaagaacttcgacaagatggctcagatcccaaatttccaaaagaatctgtcctcaagaaaggataaaattgatctcttgttcgaggagaacaacttcaagcctttcaaatacaacgacttaggcgccctggcatacctgggaagcgaaagagccattgcaaccatccgtagcggtaagagaaccttttacaccggcggtggcctgatgaccttctacttatggagaatcttgtacatgagcatgattctaagcgcacgctcgagattaaaggtgttcttcgactggatcaaactggcattcttcaaaagagacttctttaagggcttatag

SEQ ID NO: 290 - DNA, 1542 bp, Artificial Sequence
  source: /note="Description of Artificial Sequence: Synthetic polynucleotide"
atgctgtcgaagaacctgtacagtaaccggcggctgctcacctcgaccaacaccctcgtgcgcttcgcctccaccagatccaccggcgtcgaaaactccggagctggtcccacaagcttcaagaccatgaaggtcattgacccccagcacagcgacaagcccaacgtgctgatcctgggctcgggctggggagccatctcgtttctgaagcacattgacaccaagaagtacaacgttagcatcatctctcccagaagctatttcttatttacgcctctgctgccctctgcaccagtgggaacagtagacgaaaagtcaattattgagcccatcgtgaacttcgctctgaagaaaaaggggaacgtcacctactatgaggcagaggccacctctatcaatcccgaccggaataccgttaccataaagagcctgagcgccgtgagccagctgtaccagcctgagaaccacctaggcctgcatcaggccgagcccgccgaaattaagtacgattatctgatcagtgccgtaggcgcggagcccaacacctttggaatccctggggtgaccgactacggccatttcttcaaagagatccccaactctttggaaatacggcggaccttcgccgccaatctggaaaaggccaacttactgccaaagggcgaccccgaacggagaaggctgctgtccattgtggtcgttggcggtggccccactggcgtggaagccgctggcgagctgcaggactatgttcaccaggacctgcggaagttcctccccgccctggccgaggaagtccagattcacttggtcgaagccctgcccatcgtgttgaacatgtttgagaagaagctgtcatcatacgcgcaaagccatctggaaaacacttccatcaaagtgcacctgagaacggctgtcgccaaggtggaagagaagcaattgctggcaaagaccaagcacgaggacggtaagattaccgaagaaaccatcccctacggtaccctgatttgggccaccggtaacaaggccagacccgtgatcaccgaccttttcaagaaaattcctgagcagaactcgagcaagagaggcttggccgtgaacgacttcctgcaggtcaaaggcagcaacaacatcttcgccatcggtgacaacgcctttgccggcttgccaccaacagcccaggtagcgcaccaggaggccgagtatctggccaagaacttcgacaaaatggctcagatccccaatttccagaagaacctgtcctccagaaaggataagattgatctgttgttcgaggagaacaacttcaaacctttcaaatacaacgacttaggcgccttagcctacctgggctccgaaagggccattgccaccatcagaagcggcaagcggaccttctacaccggcggtggcctgatgaccttctacttatggcggatcctgtacatgtccatgatcctgagcgcacgcagcagactgaaggtgttcttcgactggatcaagttagccttcttcaagagagacttcttcaagggattatag

SEQ ID NO: 291 - DNA, 1542 bp, Artificial Sequence
  source: /note="Description of Artificial Sequence: Synthetic polynucleotide"
atgctaagcaagaacttgtacagcaacaagaggttgctgaccagcaccaacaccctcgtgcgcttcgcctccaccagatccaccggcgtcgaaaactccggggcaggccccacaagcttcaagaccatgaaggtcatcgaccctcagcacagcgacaagcccaacgtgctgatcctgggttcggggtggggcgccatttcgtttctgaagcacatcgacaccaagaagtacaacgttagcatcatctctcctagaagctacttcttacacacccctctgttacccagcgcacctgttggaaccgtagacgaaaagtccattatcgagcccatcgtgaacttcgccctcaagaaaaagggcaacgtcacctactatgaggccgaggccaccagcatcaaccccgaccggaacaccgtgaccataaagtcattaagcgccgtgagccagctgtaccaacccgagaaccatctaggcctgcatcaagccgagcctgctgagattaagtacgactacttaatcagcgccgtaggcgcggaacctaacacctttggtatccccggcgtgactgattacggtcatttcctggaggaaatccccaacagcctggaaatcagaagaaccttcgccgccaacctggaagaggccaacctgctgcctaagggcgaccccgaacggagaagactgctgagcattgtcgtcgttggtggaggccccactggcgtggaagctgctggcgagctacaggactatgtgcaccaggacctgagaaagttcctgcccgcattggccgaggaagtccaaattcacctggtggaagctctgcccatcgtgttgaacatgtttgagaaaaagcttagctcatacgcccaatcacacttagaaaacacctcgatcaaggtgcacctgagaaccgccgtcgccaaggttgaagagaagcaactgttggccaagaccaagcacgaagacggcaagattaccgaagaaaccatcccatacggtaccttgatttgggccaccggtaacaaggccagaccggtaatcaccgacctgttcaagaagattcctgagcaaaacagcagcaagagaggcctggcagtgaatgactttttgcaggtgaaaggcagcaacaacattttcgccatcggcgacaatgcctttgctggcctgcctcctaccgcccaggtagcccaccaagaggccgagtacctggccaagaactttgacaagatggcccagatacccaatttccagaagaacctgtcttcaagaaaggataaaattgatctgttgttcgaggaaaacaactttaagcccttcaagtacaacgacctgggcgccttagcatacctgggcagcgaaagagccattgccaccatccgtagcggtaagagaaccttctacaccggcggtggcttaatgaccttctacctgtggagaatcctgtacttgagcatgatcctgagcgccagaagcagattaaaggtgttcttcgactggattaagttagcattcttcaagagggacttcttcaaaggactgtga

SEQ ID NO: 292 - DNA, 1542 bp, Artificial Sequence
  source: /note="Description of Artificial Sequence: Synthetic polynucleotide"
atgctgtcgaagaacctgtacagcaaccggcggttgctgaccagcacgaataccctcgtgagattcgctagcaccagatccaccggcgtggaaaacagcggagctggccccacaagctttaagaccatgaaggtcatcgacccccagcacagcgacaagcccaacgtgctgatactgggctcgggctggggcgctatctcgtttctgaagcacattgacaccaagaagtacaacgtcagcatcatcagccccagaagctacttcctgtttacccctctgctgcctagcgcacctgtgggaaccgtggacgagaagtcaatcattgagcccatcgtgaatttcgccctcaagaaaaaggggaacgtcacctactacgaggcagaggccacctctatcaaccccgaccggaataccgtgaccataaagagcctgtctgccgtgagccagctgtaccaacccgagaaccacctgggcctgcaccaagcagaacccgctgaaattaagtacgactatttaatcagcgctgtgggtgccgagcccaacacctttggtattcccggggtgaccgattacggtcacttcctggaggagattcccaacagcttggaaatacggcggacttttgccgccaatctagaaaaggccaacttactgcctaagggtgatcccgaaagaagaagactgctgtccatcgtggtcgttggtggtggccccacaggcgtggaagccgctggtgagctacaggactatgtgcaccaggacctgcggaagtttctccccgccctggccgaagaagtgcagattcacttggtggaagctctgcccatcgtgttgaacatgttcgagaaaaagctgagcagctacgcgcagagccatttagaaaacacttcgatcaaggtacacctgagaaccgccgtcgccaaggtggaagaaaagcagctgttggcaaagaccaaacacgaggacggcaaaataaccgaggaaactatcccctacggcactctgatttgggccaccggcaacaaggccagacccgtaatcaccgacctgttcaagaaaattcccgagcagaacagcagcaagcggggcctggccgtgaacgacttcttgcaggtgaaaggcagcaacaacatcttcgccattggcgacaatgcatttgccgggctgccacctaccgcccaggtggcgcaccaagaagccgaatacttggccaagaatttcgataaaatggcccaaatccccaatttccaaaagaacctgtcttcccggaaggataagattgatctgctgttcgaggaaaacaactttaagcccttcaagtacaacgacctgggcgccttagcctacctgggaagcgaaagagccattgcaaccataagaagcggtaagcggacattttacaccggtggaggcttaatgaccttctacctgtggagaatcctgtacttgtccatgatcctgagcgcacgcagcagattaaaggtgttcttcgactggatcaagatggcattcttcaaaagggacttcttcaagggcttatga

SEQ ID NO: 293 - DNA, 1542 bp, Artificial Sequence
  source: /note="Description of Artificial Sequence: Synthetic polynucleotide"
atgctatcgaagaacttgtacagcaacaagcggttgctcacctcgaccaacacgctcgtgagattcgctagcaccagatccaccggggtggaaaactccggggcaggtcccaccagcttcaagaccatgaaggtcatcgacccccagcacagcgacaagccaaacgtgctgatactgggctctggctggggagctatcagctttctgaagcacattgacaccaagaagtacaacgtctccatcatcagccctagaagctatttcttattcacccccctgttacccagcgcccctgttggaacagtagacgagaagtccatcattgagcccatcgtgaacttcgccctgaagaaaaagggcaacgtcacctactatgaggcagaggccacctctatcaaccccgacaggaacaccgtgaccataaagagcttatctgccgtttcccagctataccaacccgagaaccacctgggcctgcatcaagccgaacccgctgagattaagtacgactatctgatcagtgccgtgggtgccgagcccaacacatttggaattcccggcgtcaccgactacggtcatttcctgaaagaaatccccaactctctggaaatacggagaacctttgccgccaacctagaagaggccaacttactgccaaagggcgaccccgagagaagaagactactgagcatcgtggtggttggcggtgggcccacaggcgtggaggccgctggcgaactacaggactacgttcaccaggacctgagaaagtttttccccgccctggccgaagaagtgcaaattcacttggtcgaagctctgcccatcgtgttgaatatgttcgagaagaagcttagcagctacgcccaatcacacctggaaaacacctccatcaaagtgcacctgagaaccgccgtcgccaaggtggaagagaagcagctgctggccaagaccaagcacgaggacggtaagataaccgaggaaactatcccctacggcaccctgatttgggccacgggcaacaaggcaagaccggtgatcactgacctgttcaagaagatccccgagcagaacagcagcaagagaggattggcagtgaatgacttcttgcaggtcaaaggcagcaacaacatcttcgccatcggcgacaacgcctttgccgggctgcctcctaccgcccaggtggcgcaccaagaggccgaatatctggccaagaactttgacaagatggctcagataccaaatttccagaagaatctgtcttcccggaaggataagatcgatctgctgttcgaggaaaacaacttcaagcccttcaaatacaacgacttaggcgccctggcatacctgggaagcgaaagagccattgccaccataagatccggcaagcggaccttctacaccggcggaggcctgatgaccttctacctgtggcggatcctgtacttgagcatgattctatctgcaagatcgagactgaaggtgttcttcgactggatcaaactggcctttttcaagagggacttcttcgagggactgtag

SEQ ID NO: 294 - DNA, 1542 bp, Artificial Sequence
  source: /note="Description of Artificial Sequence: Synthetic polynucleotide"
atgctaagcaagaatctgtacagcaacaagaggctgctcacctcgaccaacacgctagtgcgcttcgctagcaccagatccacaggggtcgaaaactccggggcaggccccacatctttcaagaccatgaaggtcatcgacccccagcacagcgacaaaccaaacgtgctgatactgggctcgggctggggagccatcagctttctgaagcacatcgacaccaagaagtacaacgtcagcatcatctctcccagaagctacttcctgttcacccccctgctgcctagcgcaccagttggaaccgtagacgaaaagtccattatcgagcccatcgtgaactttgctctgaagaaaaaggggaacgtcacctactacgaggccgaggccaccagcatcaaccccgaccggaacaccgtgaccatcaaaaacttaagcgccgtgtcccagctgtaccaacctgagaaccacctagggctgcaccaggccgagcctgccgagattaagtacgactatttaatcagtgccgtgggtgccgaacccaacacatttggtatccctggcgtcactgactacggccacttcctgaaagagatccccaacagcttggaaatacggcggacttttgccgccaacctggagaaggctaacctgctgcctaagggcgatcccgaacggagaaggctgctgtccatcgtcgtggtgggcggagggcccacaggcgtagaggccgctggtgaactacaggactatgttcaccaggacctgcggaagtttctgcctgcactggccgaagaagtccagattcacctggtcgaagccctgcccatcgttttgaacatgtttgagaaagagctgagctcatacgcccagagccacctggaaaacacctccatcaaggtgcacctgagaaccgctgtcgccaaggttgaagaaaagcaattgctggcaaagaccaaacacgaggacggcaagataaccgaagaaaccatcccctacggtaccttgatttgggccaccggcaacaaggccagacccgtgatcaccgacctgttcaagaaaatccccgagcagaacagctccaagcggggcctggccgtgaacgacttcctgcaggtgaaaggcagcaacaacatcttcgccattggtgacaatgcatttgccggcttgccaccaaccgcccaggtggcgcaccaggaagccgagtacttggccaagaatttcgacaaaatggcccagatccccaatttccagaagaatctgtcctcccggaaggataagattgatctcttgttcgaggaaaacaactttaagcctttcaagtacaacgacctgggtgccctggcctacctgggcagcgaaagggccattgccaccatccgtagcggcaagcggacattttacaccggcggaggcctgatgaccttctacctgtggcagatcctgtacctgtccatgatcctatctgcccgcagcagactgaaggtgtttttcgactggatcaagctggcctttttcaaaagagacttttttaagggcctgtag

SEQ ID NO: 295 - DNA, 1542 bp, Artificial Sequence
  source: /note="Description of Artificial Sequence: Synthetic polynucleotide"
atgctaagcaagaatctgtacagtaacaagcggctgctcaccagcacgaacaccctcgtccgcttcgctagcaccagatccacaggcgtggaaaacagcggagcaggccctacaagcttcaagaccatgaaggtcatcgacccccagcacagcgacaagcccaacgtgctgatactgggctctggctggggcgccatctcgtttctgaagcacatcgacaccaagaagtacaacgtcagcatcatcagccccagaagctatttcctgtttacccccttgatgcccagcgcaccagtggggacagtggacgaaaagtccatcatcgagcccatcgtgaacttcgctctcaagaaaaagggcaacgttacctactacgaggcagaagccaccagcatcaaccccgacaggaataccgtgaccatcaaaaacctgtctgccgtgtcccagctataccagcccgaaaaccacctggggctgcaccaagccgaacctgccgagattaagtacgactatttaatcagtgccgtgggcgcggaacccaacacatttggtattcccggcgtcaccgactacggccacttcctgaaagaaatccccaactctctggaaatccggagaacctttgccgccaatctagaaaaggctaacttactgcctaagggcgaccccgagcggagaaggctgctgagcattgtggtcgtgggcggtgggcctactggcgtggaagctgctggtgaactgcaggactacgtgcaccaggacctgagaaagttcctgcccgccctggccgaggaagtgcaaattcacctggtggaagccctgcccatcgttctgaacatgttcgagaaaaagctgagcagctacgcccaatcacacctggaaaacacttccatcaaggtgcacctgagaacggctgtcgccaaagtggaagagaagcagctgttggccaagaccaaacacgaagacggtaaaataaccgaagaaactatcccctacggtactctgatttgggccacgggtaacaaggcaagaccggtgatcaccgacctgttcaagaagattcccgagcaaaactcgagcaagcggggactggcagtgaatgacttcctgcaggtcaaaggcagcaacaacatcttcgccatcggtgacaatgcatttgccgggttgccacctacagcccaagtggcgcaccaggaggccgaatatttggccaagaacttcgataagatggcccagatccccaatttccaaaagaacctatcctcccggaaggataagattgacctgctgttcgaggaaaacaacttcaagcccttcaagtacaacgatctgggcgccttagcctacctgggctccgaaagagccattgccaccatacgttccggcaagcggacattttacaccggtggaggcttaatgaccttctacctgtggagaatcctgtacatgagcatgattctgtctgcacgctcgagactgaaggtcttcttcgactggattaagttagccttcttcaaaagggacttcttcaagggcctgtga

SEQ ID NO: 296 - DNA, 1542 bp, Artificial Sequence
  source: /note="Description of Artificial Sequence: Synthetic polynucleotide"
atgctgagcaagaacctgtatagtaacaagcggctgctgacctcgaccaacaccctagtgagattcgctagcaccagatccaccggggtggaaaacagcggggctggccctacctcttttaagaccatgaaggtcattgacccccagcacagcgacaagcccaacgtgctgatactgggttctggctggggcgccattagctttctgaagcacattgacaccaagaagtacaacgttagcatcatctctcccagaaagtatttcctgttcacgcctttgatgcctagcgcccctgttggaacagtggacgagaagtccatcatcgagcccatcgtgaatttcgctctgaagaaaaagggcaacgtcacctactacgaggcagaggccaccagcatcaatcccgaccggaataccgttaccataaagagcttaagcgccgttagccagctataccagcccgagaaccatctaggcctgcaccaggcagaacccgccgagattaagtacgattacctgatcagcgccgtgggtgcggagcccaacacatttggtatccccggcgtgactgactacggccacttcctgaaggagatccccaacagcctggaaatacggcggacttttgccgccaatctggaaaaggccaacctgctgccaaagggcgaccccgagagaagaagactgctgtccatcgtcgtggttggcggtggccctacaggcgtggaagccgctggcgagctgcaggattacgtgcaccaggacctgagaaagtttctgcccgccttggccgaagaagtgcagattcacctggtggaagccctgcccatcgttctgaacatgttcgagaagaagctgtcaagctacgcccagagccatctggaaaacacctcgatcaaggtacacctgagaaccgctgtggccaaggtggaagaaaagcaattgctggcaaagaccaaacacgaggacggcaagattaccgaagaaactattccatacggtactctgatttgggccacgggcaacaaggcaagaccggtgatcaccgacctgttcaagaagattcctgagcaaaacagcagcaagcggggcttggccgtgaacgacttcctgcaggtcaaaggcagcaacaacattttcgccattggcgacaacgcctttgccgggttgcctcctaccgcccaggtagcccaccaagaagccgaatacatcgccaagaattttgacaagatggctcaaatccccaatttccaaaagaacctatcttccagaaaggataagatcgatctgctgttcgaggagaacaacttcaagcccttcaaatacaacgatctgggtgccctggcatacctgggcagcgaaagagccattgccaccatcagatccggtaagcggacattttacaccggtggaggcttaatgaccttctacctgtggcggattttgtacctgagcatgatcctaagcgcccgcagcagactgaaggtcttcttcgactggatcaagttagccttcttcaaaagagacttttttaagggcttatga

SEQ ID NO: 297 - DNA, 1542 bp, Artificial Sequence
  source: /note="Description of Artificial Sequence: Synthetic polynucleotide"
atgctgagcaagaacctgtacagcaacaagaggctgctgaccagcaccaacaccctcgtgagattcgccagcaccagatccaccggggtggaaaacagcggagcaggccctacatctttcaagaccatgaaagtcatcgacccccagcacagcgacaagcccaacgtgctgatactgggctctggctggggagctattagctttttaaagcacattgacaccaagaagtacaacgttagcatcatcagccctagaagctatttcttatttacccctttgctgcccagcgcccctgtgggaacagtggacgaaaagtcaattattgagcccatcgtgaatttcgctctgaagaaaaaggggaacgtcacctactacgaggccgaggccaccagcatcaaccccgaccggaataccgtgaccatcaagagcctgagcgccgtgtcccagctataccagcctgagaaccacctgggcctgcatcaagccgagcctgctgagattaagtacgactatctgatcagcgccgtaggtgccgagcccaacacctttggtatccctggcgtgactgactacggccacttcctgaaggaaatccccaacagcctggaaatccggcggacctttgccgccaacctggaagaggccaacctgttgccaaagggtgaccccgaacggagaaggctgctgagcattgtcgtggtgggcggaggccctacaggcgtggaagctgctggcgagctacaggattatgtgcaccaggacctgagaaagtttctccctgccctggccgaagaagtccagattcacttggtggaagccctgcccatcgttctgaacatgttcgagaaagagctttcaagctacgcgcaaagccacttagaaaacacctccatcaaagtacatctgagaaccgccgtcgccaaagttgaagagaagcaactgttggccaagaccaagcacgaagacggcaagattaccgaggaaaccatcccctacggtactctgatttgggccaccggtaacaaggccagaccggtaatcaccgacctgttcaagaagattcctgagcagaacagcagcaagagaggactggcagtgaacgactttttgcaggtgaaaggcagcaacaacattttcgccatcggtgacaacgcctttgccgggttgccacctacagcccaggtggcccaccaagaagccgaatatctggccaagaattttgacaaaatggctcagatcccaaatttccagaagaacctgtcctcaagaaaggataagattgatctcttgttcgaggaaaacaacttcaagcccttcaagtacaacgatttaggtgccctggcctacctgggctccgaaagagccattgcaaccatccgttccggcaagagaacattttacaccggtggaggcctgatgaccttctacctgtggcggattctgtacctgagcatgatcctgagcgcccgcagcagactgaaggtgttcttcgactggattaagctggcctttttcaagagagacttcttcgagggcctgtga

SEQ ID NO: 298 - DNA, 1542 bp, Artificial Sequence
  source: /note="Description of Artificial Sequence: Synthetic polynucleotide"
atgctaagcaagaatttgtatagcaacaagcggttgctgaccagcacgaatacgctcgtgagattcgccagcaccagatccaccggcgtggaaaacagcggagctggccccacaagcttcaagaccatgaaagtcattgaccctcagcacagcgacaagccaaacgtgctgatactgggttcggggtggggcgccatttcgtttctgaagcacattgacaccaagaagtacaacgtttccatcatctctcccagaaagtacttcctgttcacgcccctgttaccctctgcacctgttggaaccgtggacgaaaagtccatcatcgagcccatcgtgaacttcgctctcaagaaaaaggggaacgtcacctactacgaggccgaggccaccagcatcaaccccgaccggaataccgttaccatcaaaagcctgagcgccgtgagccagctataccagcccgaaaaccacctggggctgcatcaggccgagcccgccgagattaagtacgattacctgatcagcgccgtaggcgccgagcccaacacatttggtatccctggcgtcaccgattacggccacttcctggaggagatccccaactctctggaaataagacggactttcgccgccaacctggaaaaggctaacttactgccaaagggcgatcccgagcggagaaggctactgtccattgtcgtcgttggtggagggcccactggcgtagaggctgctggtgaactgcaggattatgtgcaccaggacctgcggaagtttctgcccgccctggccgaggaagtgcagattcacctggtggaagccctgcccatcgtgctgaatatgtttgagaaggagctgagcagctacgcccagagccacctggaaaacacctccatcaaggtgcatctgagaacggccgtcgccaaggttgaagagaagcaactgttggccaagaccaagcacgaggacggcaagattaccgaagaaactatcccctacggcactttgatttgggccacgggcaacaaggccagaccggtgatcaccgaccttttcaagaagatccccgagcaaaacagcagcaagcggggattggccgtgaatgacttcttgcaggtgaaaggcagcaacaacatcttcgccatcggtgacaacgcctttgccggcctgcctccaacagcccaagtggcgcaccaggaagccgagtacctggccaagaactttgacaaaatggctcagatcccaaatttccaaaagaatctgtcttcaagaaaggataaaatcgacctcctgttcgaggagaacaacttcaagcctttcaagtacaacgacctgggcgccctggcctacctgggatccgaaagagccattgccaccatccgttccggtaagcggacattctacaccggcggaggcttaatgaccttctacctgtggcggatcttgtacctgtccatgatcctgtctgcccgctcgagattaaaggtctttttcgactggatcaagctggccttcttcaagagagacttttttaaaggcctgtga

SEQ ID NO: 299 - DNA, 1542 bp, Artificial Sequence
  source: /note="Description of Artificial Sequence: Synthetic polynucleotide"
atgctgagcaagaacctgtacagcaacaagaggctgctcaccagcaccaacaccatggtccgcttcgcctccaccagatccaccggggtggaaaacagcggggctggccccacctctttcaagaccatgaaggtcatcgacccccagcacagcgacaagcccaacgtgctgatactgggttctggctggggagccattagctttctgaagcacatcgacaccaagaagtacaacgtttccatcatcagccccagaagctatttcctgttcacccctctgttacccagcgcaccagttggaacagtggacgagaagtccattatcgagcccatcgttaatttcgccctgaagaaaaaggggaacgttacctactacgaggccgaggccaccagcatcaatcccgaccggaacaccgtgaccatcaaaagcttatctgccgtgagccagctgtaccagcctgaaaaccacctgggcctgcatcaggcagagcctgctgagattaagtacgattacctgatcagtgccgtgggtgccgagcctaacacctttggtatccccggggtcactgactacggccacttcctgaaggagatccccaacagcttggaaatcagacggacctttgccgccaacctagaaaaggccaacctgctgccaaagggtgatcccgaacggagaagactgctgtccattgtggtggttggcggagggcctactggtgtagaagccgctggcgaactgcaggactacgttcaccaggacctgcggaagttcctgcctgccctggccgaagaagtccaaattcacttggtcgaagccctgcccatcgttttgaacatgttcgagaagaagctgagcagctacgcccaaagccacctggaaaacacctcgatcaaggtgcacctgagaaccgccgtcgccaaagtggaagagaagcagttgctggcaaagaccaaacacgaggacggcaaaataaccgaggaaaccattccctacggcaccctgatttgggccacgggcaacaaggccagaccggtgatcactgaccttttcaagaaaattcctgagcagaacagctccaagagaggcttggcagtgaatgacttcctgcaggtcaaaggcagcaacaacatcttcgccattggtgacaacgcctttgccgggctgcctcctacagcccaagtggcccaccaagaagccgaatatatcgccaagaatttcgacaagatggctcagatacccaatttccaaaagaacctatcctccagaaaggataagatcgatctcctgttcgaggaaaacaacttcaaacctttcaagtacaacgacttaggcgccctggcctacctgggcagcgaaagagccattgcaaccataagaagcggcaagcggacattctacaccggcggaggcctgatgaccttctacttatggcggattctgtacctgagcatgatcctatctgcacgctcgagactgaaggtcttcttcgactggatcaaactggccttcttcaaaagggacttctttgagggcctgtga

SEQ ID NO: 300 - DNA, 1542 bp, Artificial Sequence
  source: /note="Description of Artificial Sequence: Synthetic polynucleotide"
atgctgtcgaagaatctgtatagtaacaagaggttgctgaccagcacgaacacgctagtccgcttcgctagcaccagatccaccggggtcgaaaacagcggggctggccccaccagcttcaagaccatgaaggtcatcgaccctcagcacagcgacaagcccaacgtgctgatcctgggctctgggtggggcgccatctcgtttttaaagcacattgacaccaagaagtacaacgttagcatcatctctcccagaagctacttcctgttcacgcccttgttacccagcgcccctgtggggacagtggacgaaaagtccatcatcgagcccatcgttaattttgccctcaagaaaaaggggaacgtcacctactacgaggccgaagccacctctatcaatcccgaccggaacaccgtgaccataaagaacctgagcgccgtttcccagctgtaccaacccgagaaccatctggggctgcaccaggccgagcccgccgaaattaagtacgattacctgatcagtgccgtaggcgcggaacccaacacctttggtattcctggcgtcaccgactacggtcatttcttcaaggaaattcccaactctctggaaatccggcggaccttcgccgccaacctagaaaaggccaacctgctgccaaagggtgaccccgagcggagaaggctgctgagcatcgtcgtcgtgggcggtggccccactggcgtagaagccgctggtgagctgcaggactacgttcaccaggacctgcggaagttcctgcccgcattggccgaggaagtgcaaattcacctggtggaagctctgcccatcgttctgaacatgttcgagaagaagctttcaagctacgcgcagagccacttagaaaacacttcgatcaaagtgcacctgagaacggctgtggccaaggtggaagaaaagcaattgctggccaagaccaagcacgaggacggcaaaattaccgaagaaaccatcccatacggtactctgatttgggccaccggcaacaaggccagacccgtgatcactgacctgttcaagaaaatccccgagcagaactcgagcaagcggggcttggccgtgaacgactttttgcaggtcaaaggcagcaacaacatcttcgccatcggtgacaacgcctttagcggcctgcctccaaccgcccaggtggcgcaccaagaggccgaatatctggccaagaactttgacaagatggctcagatacccaatttccagaagaacctgtcttcacggaaggataagattgacctcttgttcgaggaaaacaacttcaagcctttcaagtacaacgatttaggtgccctggcctacctgggctccgaaagagccattgcaaccatccgtagcggtaagcggaccttctacaccggtggaggcttaatgaccttctacttatggcggatcctgtacttgagcatgattctgagcgcaagatcgagactgaaggtcttcttcgactggatcaaactggcattcttcaagagagactttttcaagggcctgtga

SEQ ID NO: 301 - DNA, 1542 bp, Artificial Sequence
  source: /note="Description of Artificial Sequence: Synthetic polynucleotide"
atgctgagcaagaatctgtacagtaacaagcggctgctcaccagcacgaacacgctagtgagattcgccagcaccagatccaccggggtcgaaaacagcggggctggtcccacaagcttcaagaccatgaaggtcattgacccccagcacagcgacaagcccaacgtgctgatcctgggctcggggtggggcgccatcagctttttaaagcacatcgacaccaagaagtacaacgtcagcatcatcagccctagaaagtacttcctgttcacccccctgctgccctctgcccctgttgggaccgtggacgaaaagtcaatcatcgagcccatcgtgaatttcgctctcaagaaaaagggcaacgttacctactacgaggccgaagccacctctatcaaccccgaccggaataccgttaccataaagagcttatctgccgtttcccagctataccagcccgagaaccatctagggctgcaccaagccgaacccgccgaaattaagtacgactacttaatcagcgccgtaggtgccgagcccaacacatttggaatccccggcgtgaccgattacggccacttcctgaaagagatccccaactctctggaaatccggcggactttcgccgccaacctggaaaaggctaacctgctgcctaagggcgatcccgagcggagaagactactgtccattgtggtggtgggcggaggccccactggtgtggaggccgctggtgagctgcaggactacgttcaccaggacctgcggaagttcctgcccgcactggccgaggaagtgcaaattcacctggtggaagccctgcccatcgttttgaatatgtttgagaagaagctttcaagctacgcgcaaagccatctggaaaacacttcgatcaaagtacacctgagaaccgccgtggccaaggttgaagaaaagcaattgctggcaaagaccaaacacgaagacggcaagattaccgaagaaactatcccatacggtactttgatttgggccacgggcaacaaggcaagacccgtgatcaccgacctgttcaagaagatccctgagcagaacagcagcaagcggggcctggccgtgaacgacttcctgcaggtgaaaggcagcaacaacattttcgccatcggcgacaatgcatttgctggcctgcctcctacagcccaggtagcgcaccaggaagccgaatacctggccaagaattttgacaaaatggcccaaataccaaatttccaaaagaatctgtcttcccggaaggataaaatcgatctgctgttcgaggaaaacaactttaagcctttcaagtacaacgatctgggtgccctggcctacctgggcagcgaaagagccattgccaccatcagatccggcaagagaaccttctacaccggcggtggcctgatgaccttctacctgtggagaattttgtacatgagcatgattctaagcgcaagatcgagactgaaggtgtttttcgactggatcaagatggcatttttcaagagagacttcttcaagggcctgtga

SEQ ID NO: 302 - DNA, 1542 bp, Artificial Sequence
  source: /note="Description of Artificial Sequence: Synthetic polynucleotide"
atgctaagcaagaatctgtatagcaacaagcggttgctgaccagcacgaacacgatggtgcgcttcgcttccaccagatccacaggcgtcgaaaactccggggcaggtcccacaagcttcaagaccatgaaagtcattgacccccagcacagcgacaagccaaacgtgctgatactgggctctgggtggggagccatcagctttctgaagcacattgacaccaagaagtacaacgtctccatcatcagccccagaagctacttcttattcacccctctgatgcctagcgcccctgtgggaaccgtggacgagaagtcaatcatcgagcccatcgttaatttcgctctcaagaaaaagggcaacgtcacctactacgaggccgaagccacctctatcaaccccgaccggaacaccgtgaccatcaaaagcttatctgccgtgtcccagctataccagcccgagaaccacctgggcctgcaccaggccgaacccgccgagattaagtacgactatttaatcagcgccgtaggtgcggagcctaacacatttggtatccccggggtgaccgactacggtcacttcctgaaagaaattcccaactctttggaaatcagacggacctttgccgccaacctggaaaaggccaacttactgccaaagggcgaccccgagcggagaaggctactgagcattgtggtggtgggcggaggccctactggcgtagaggccgctggcgagctgcaggactatgtgcaccaggacctgagaaagtttctccctgccctggccgaggaagtgcagattcacctggtcgaagccctgcccatcgttctgaacatgtttgagaaggagctgtcatcatacgcccagtcacacctggaaaacacctccatcaaagtgcacctgagaaccgccgtcgccaaggttgaagaaaagcaattgttggccaagaccaaacacgaagacggtaaaataaccgaggaaactatcccctacggtaccttgatttgggccacgggtaacaaggcaagaccggtgatcaccgaccttttcaagaagattcccgagcagaacagctccaagcggggcttggccgtgaatgactttctgcaggtgaaaggcagcaacaacattttcgccatcggcgacaatgcctttgctgggttgcctcctacagcccaggtggcccaccaggaagccgagtacctggccaagaatttcgacaagatggctcaaatccccaatttccagaagaacctgtcctccagaaaggataagatcgacctgctgttcgaggaaaacaactttaagcccttcaagtacaacgatttaggcgccctggcatacctgggctccgaaagggccattgccaccatacgtagcggcaagcggacattctacaccggcggtggcctgatgaccttctacctgtggagaattctgtacctgtccatgatcctgtctgcccgctcgagattaaaggtgtttttcgactggatcaagctggccttcttcaagagggacttttttaagggcttatga

SEQ ID NO: 303 - DNA, 1542 bp, Artificial Sequence
  source: /note="Description of Artificial Sequence: Synthetic polynucleotide"
atgctaagcaagaacctgtatagtaacaagaggctgctgacctcgacgaacaccctcgtgcgcttcgcctccaccagatccaccggcgtcgaaaactccggagctggccccaccagcttcaagaccatgaaggtcatcgacccccagcacagcgacaaacccaacgtgctgatcctgggctcgggctggggcgctatcagctttttaaagcacattgacaccaagaagtacaacgttagcatcatcagccctagaaagtacttcctgtttacgcctctgctgccttctgcccctgttgggacagtggacgagaagtcaattattgagcccatcgttaactttgctctgaagaaaaaggggaacgtcacctactacgaggccgaagccaccagcatcaaccccgacaggaataccgttaccataaagagcctgagcgccgtgagccagctgtaccaacctgagaaccacctaggcatgcatcaagcagagcccgccgagattaagtacgactacctgatcagtgctgtgggtgccgaacccaacacctttggtatccccggcgtgactgactacggtcacttcctgaaggaaattcccaactctctggaaatcagaagaacctttgccgccaatctagaaaaggccaacctgttgcctaagggtgatcccgagcggagaagactactgagcattgtggtcgttggcggaggccctactggcgtagaagccgctggcgaactacaggactatgtgcaccaggacctgcggaagttcttccccgccctggccgaggaagtgcagattcacttggtggaagctctgcccatcgttttgaacatgtttgagaagaagcttagcagctacgcgcagagccacctggaaaacacctccatcaaagtgcacctgagaacggctgtggccaaggtggaagagaagcaactgctggccaagaccaaacacgaagacggcaagattaccgaggaaaccatcccctacggcactctgatttgggccaccggcaacaaggcaagaccggtgatcaccgaccttttcaagaaaatccccgagcaaaactcgagcaagcggggcttggcagtgaacgactttctgcaggtcaaaggcagcaacaacatcttcgccatcggcgacaacgcctttgctggcctgcctcctaccgcccaggtagcgcaccaggaggccgagtacttggccaagaactttgataagatggctcaaatacccaatttccagaagaatctatcctcccggaaggataaaatcgacctgctgttcgaggagaacaacttcaagcctttcaaatacaacgatctgggcgccctggcctacctgggctccgaaagggccattgcaaccatcagatccggcaagcggaccttttacaccggtggaggcctgatgaccttctacctgtggcggattctgtacctgagcatgattctgagcgcaagaagcagattaaaggtgttcttcgactggattaagctggcctttttcaagagggacttcttcaagggcttatga

SEQ ID NO: 304 - DNA, 1542 bp, Artificial Sequence
  source: /note="Description of Artificial Sequence: Synthetic polynucleotide"
atgctgagcaagaacctgtacagcaacaagcggctgctgaccagcacgaacaccctcgtgcgcttcgccagcaccagatccaccggcgtcgaaaacagcggggctggccccaccagctttaagaccatgaaggtcatcgacccccagcacagcgacaagcccaacgtgctgatactgggctctgggtggggcgctatcagctttctgaagcacatcgacaccaagaagtacaacgtcagcatcatcagccccagaagctacttcctgttcacccccctgctgcccagcgccccagtggggaccgtggacgagaagtccatcatcgagcccatcgtgaattttgccctgaagaaaaagggcaacgtcacctactacgaggccgaggccaccagcatcaaccccgaccggaacaccgtgaccatcaaaagcctgagcgccgtgtcccagctgtaccagcccgagaaccacctgggcctgcaccaggccgagcccgccgagattaagtacgactacctgatcagcgccgtgggcgccgagcccaacacctttggaatccccggcgtgaccgactacggccacttcctggaggagatccccaacagcctggaaatccggcggaccttcgccgccaacctggaaaaggccaacctgttgcctaagggcgaccccgagcggagaaggctgctgagcatcgtcgtcgtgggcggaggccccacaggcgtggaagctgctggcgagctgcaggactacgtgcaccaggacctgcggaagttcctgcctgccctggccgaggaagtgcagattcacctggtggaagccctgcccatcgttttgaacatgttcgagaaggagctgagcagctacgcccagagccacctggaaaacacctcgatcaaggtacacctgagaacggccgtggccaaggtggaagagaagcagctgctggccaagaccaagcacgaggacggcaagattaccgaggaaaccatcccctacggcaccctgatttgggccaccggcaacaaggccagacccgtgatcaccgacctgttcaagaaaattcccgagcagaacagcagcaagcggggcctggccgtgaacgacttcctgcaggtgaaaggcagcaacaacatcttcgccatcggcgacaacgcctttgctggcctgcctcctacagcccaggtggcgcaccaggaagccgagtacatcgccaagaacttcgacaagatggcccaaatccccaatttccagaagaacctgtcctcccggaaggataagatcgacctgctgttcgaggaaaacaacttcaagcctttcaagtacaacgacctgggcgccctggcctacctgggcagcgaaagagccattgccaccatcagaagcggcaagcggaccttctacaccggcggaggcctgatgaccttctacctgtggcggatcctgtacctgtccatgatcctgagcgcccgcagcagactgaaggtcttcttcgactggatcaagctggccttcttcaagagagacttctttaagggcctgtga

SEQ ID NO: 305 - DNA, 1542 bp, Artificial Sequence
  source: /note="Description of Artificial Sequence: Synthetic polynucleotide"
atgctgagcaagaacctgtacagcaacaagcggctgctgaccagcaccaacaccctcgtgcgcttcgccagcaccagatccaccggcgtcgaaaacagcggggctggccccaccagcttcaagaccatgaaagtcattgacccccagcacagcgacaagcccaacgtgctgatcctgggctctggctggggcgccatcagctttctgaagcacatcgacaccaagaagtacaacgtcagcatcatcagccccagaagctacttcctgttcacccccctgctgcccagcgcccctgtgggaaccgtggacgagaagtccatcatcgagcccatcgtgaactttgccctgaagaaaaagggcaacgtcacctactacgaggccgaggccaccagcatcaaccccgaccggaacaccgtgaccatcaaaagcctgagcgccgtgagccagctataccagcctgagaaccacctgggcatgcaccaggcagagcccgccgagattaagtacgactacctgatcagcgctgtgggcgccgaacccaacacctttggaatccctggcgtgaccgactacggccacttcttcaaagagatccccaacagcctggaaatccggcggaccttcgccgccaacctggaaaaggccaacctgctgcctaagggcgaccccgagcggagaaggctgctgagcatcgtggtcgtgggcggaggccccacaggcgtggaagctgctggcgagctgcaggactacgtgcaccaggacctgcggaagttcttccccgccctggccgaggaagtgcagattcacctggtggaagccctgcccatcgtgctgaacatgttcgagaagaagctgagcagctacgcccaaagccacctggaaaacacctccatcaaggtgcacctgagaacggccgtggccaaagtggaagagaagcagctgttggccaagaccaagcacgaggacggcaagattaccgaggaaactatcccctacggcaccctgatttgggccaccggcaacaaggccagacccgtgatcaccgacctgttcaagaagatccccgagcaaaacagcagcaagcggggcctggccgtgaatgacttcctgcaggtgaaaggcagcaacaacatcttcgccatcggcgacaacgcctttgccgggctgcctcctacagcccaggtagcccaccaggaagccgagtacctggccaagaacttcgacaagatggcccagatccccaatttccagaagaatctgtcctcccggaaggataagatcgacctgctgttcgaggaaaacaacttcaaacccttcaagtacaacgacctgggcgccctggcctacctgggcagcgaaagagccattgccaccataagaagcggcaagcggaccttctacaccggtggaggcctgatgaccttctacctgtggcggatcctgtacctgagcatgatcctaagcgcccgctcgagactgaaggtgttcttcgactggatcaaactggccttcttcaagagggactttttcaagggcctgtga

SEQ ID NO: 306 - DNA, 1542 bp, Artificial Sequence
  source: /note="Description of Artificial Sequence: Synthetic polynucleotide"
atgctgagcaagaacctgtacagcaacaagcggttgctcacctcgaccaacaccctagtgcgcttcgccagcaccagatccaccggcgtcgaaaacagcggggctggccccaccagcttcaagaccatgaaggtcatcgacccccagcacagcgacaagccaaacgtgctgatcctgggctctggctggggcgccatctcgtttttaaagcacatcgacaccaagaagtacaacgtcagcatcatcagccccagaaagtacttcctgttcacccccctgctgcccagcgcccctgtgggaaccgtggacgagaagtccatcatcgagcccatcgtgaactttgccctcaagaaaaagggcaacgtcacctactacgaggccgaggccaccagcatcaaccccgaccggaacaccgtgaccatcaagagcctgagcgccgtgtcccagctgtaccagcccgagaaccacctggggctgcaccaggccgagcccgccgagattaagtacgactacctgatcagcgccgtgggcgccgaacccaacacctttggtatccccggcgtgaccgactacggccacttcctgaaagagatccccaacagcttggaaatccggcggaccttcgccgccaacctggaaaaggccaacctgctgcctaagggcgaccccgagcggagaaggctgctgagcatcgtggtcgtgggcggaggccccactggcgtggaagctgctggcgagctgcaggactacgtgcaccaggacctgcggaagttcttccccgccctggccgaggaagtgcagattcacctggtggaagccctgcccatcgttctgaacatgttcgagaagaagctgagcagctacgcccagagccacttagaaaacacctccatcaaggtgcacctgagaaccgccgtggccaaagtggaagagaagcagctgctggccaagaccaagcacgaagacggcaagattaccgaggaaaccatcccctacggcaccctgatttgggccaccggcaacaaggccagacccgtgatcaccgacctgttcaagaagatccccgagcagaacagcagcaagcggggcttggccgtgaacgacttcctgcaggtcaaaggcagcaacaacatcttcgccatcggcgacaacgcctttgccggcctgcctcctacagcccaggtggcccaccaggaagccgagtacctggccaagaacttcgacaagatggcccagatcccaaatttccagaagaacctgtcctccagaaaggataagattgacctgctgttcgaggaaaacaacttcaagcccttcaagtacaacgacctgggcgccctggcctacctgggaagcgaaagagccattgcaaccatcagatccggcaagcggaccttctacaccggcggaggcctgatgaccttctacttatggcggatcctgtacctgagcatgattctgagcgcccgcagcagactgaaggtgttcttcgactggatcaagatggccttcttcaagagggacttcttcaaaggactgtga

SEQ ID NO: 307 - DNA, 1542 bp, Artificial Sequence
  source: /note="Description of Artificial Sequence: Synthetic polynucleotide"
atgctgagcaagaacctgtacagcaacaagaggctgctgaccagcaccaacaccctcgtgcgcttcgccagcaccagatccaccggcgtcgaaaacagcggggctggccccacaagcttcaagaccatgaaggtcatcgacccccagcacagcgacaagcccaacgtgctgatcctgggctctggctggggcgccatcagctttctgaagcacatcgacaccaagaagtacaacgtcagcatcatcagccccagaaagtacttcctgttcacgcccctgttacccagcgcccctgtgggaaccgtagacgagaagtcaatcatcgagcccatcgtgaacttcgccctcaagaaaaagggcaacgtcacctactacgaggccgaggccaccagcatcaaccccgaccggaacaccgtgaccatcaagagcctgagcgccgtgtcccagctgtaccaacccgagaaccacctgggcctgcaccaagccgagcccgccgagattaagtacgactacctgatcagcgccgtgggcgccgagcccaacacctttggaatccccggcgtgactgactacggccacttcctgaaagagatccccaacagcctggaaatcagacggactttcgccgccaacctggaagaggccaacctgctgcctaagggcgaccccgaacggagaaggctgctgagcatcgtggtcgtgggcggagggcccacaggcgtggaggctgctggcgagctgcaggactacgtgcaccaggacctgcggaagttcctgcccgccctggccgaggaagtgcaaattcacctggtggaagccctgcccatcgtgctgaacatgtttgagaaggagctgagcagctacgcccagagccacctggaaaacacctccatcaaagtgcacctgagaaccgccgtggccaaggtggaagagaagcagctgctggccaagaccaagcacgaagacggcaagattaccgaggaaaccatcccatacggtaccctgatttgggccaccggcaacaaggccagacccgtaatcaccgacctgttcaagaagatccctgagcagaacagcagcaagcggggcctggcagtgaacgacttcctgcaggtcaaaggcagcaacaacatcttcgccatcggcgacaacgcctttgccggcctgcctcctacagcccaggtggcccaccaggaagccgagtacctggccaagaacttcgacaagatggcccagatccccaatttccagaagaatctgtcctccagaaaggataagatcgacctgctgttcgaggaaaacaacttcaagcccttcaagtacaacgacctgggtgccctggcctacctgggcagcgaaagagccattgccaccatcagatccggcaagcggaccttctacaccggcggaggcctgatgaccttctacctgtggcggatcctgtacttgagcatgatcctgagcgcccgcagcagactgaaggtgttcttcgactggatcaagctggccttcttcaagagggacttcttcaagggcctgtga

SEQ ID NO: 308 - DNA, 1542 bp, Artificial Sequence
  source: /note="Description of Artificial Sequence: Synthetic polynucleotide"
atgctgagcaagaacttgtacagcaacaagcggctgctgaccagcaccaacaccctcgtgcgcttcgccagcaccagatccaccggcgtcgaaaacagcggggctggccccaccagctttaagaccatgaaggtcatcgacccccagcacagcgacaagcccaacgtgctgatcctgggctctggctggggcgccatcagctttctgaagcacatcgacaccaagaagtacaacgtctccatcatctctcccagaagctacttcctgcacacccccctgctgcccagcgcccctgtgggaaccgtggacgagaagtccatcatcgagcccatcgtgaacttcgctctgaagaaaaagggcaacgtcacctactacgaggccgaggccaccagcatcaaccccgacaggaataccgtgaccatcaagagcctgagcgccgtgtcccagctgtaccaacccgagaaccacctagggctgcaccaggccgagcccgccgagattaagtacgactacttaatcagcgccgtgggcgccgagcccaacacctttggaatccccggcgtgaccgactacggccacttcctgaaagagatccccaacagcctggaaatacggcggaccttcgccgccaatctggaaaaggccaacctgctgcctaagggcgaccccgagcggagaaggctgctgagcatcgtggtcgtgggtggaggccccacaggcgtggaagctgctggcgagctgcaggactacgtgcaccaggacctgcggaagttcctgcccgccctggccgaggaagtgcagattcacctggtggaagctctgcccatcgtgctgaacatgttcgagaaagagctgagctcatacgcccaaagccacctggaaaacacctccatcaaggtgcacctgagaaccgccgtggccaaagtggaagagaagcagctgctggcaaagaccaagcacgaggacggtaagattaccgaggaaaccatcccctacggcaccctgatttgggccaccggcaacaaggccagacccgtgatcaccgacctgttcaagaagatccccgagcagaacagcagcaagcggggcctggccgtgaacgacttcctgcaggtcaaaggcagcaacaacatcttcgccatcggcgacaacgcctttgctggcctgcctcctacagcccaggtggcccaccaggaagccgagtacctggccaagaacttcgacaagatggcccagatccccaatttccagaagaacctgtcctcccggaaggataagatcgatctgctgttcgaggaaaacaacttcaagcccttcaagtacaacgacctgggtgccctggcctacctgggcagcgaaagagccattgcaaccatcagaagcggcaagcggaccttctacaccggcggaggcctgatgaccttctacctgtggagaatcctgtacctgagcatgatcctgagcgcccgcagcagactgaaggtgttcttcgactggatcaagatggcctttttcaagagggacttcttcaagggactgtga

SEQ ID NO: 309 - DNA, 1542 bp, Artificial Sequence
  source: /note="Description of Artificial Sequence: Synthetic polynucleotide"
atgctgagcaagaacctgtacagcaacaagcggctgctgaccagcaccaacaccatggtgcgcttcgctagcaccagatccaccggcgtcgaaaacagcggggctggccccaccagcttcaagaccatgaaggtcatcgacccccagcacagcgacaagcccaacgtgctgatcctgggctctgggtggggcgccatcagctttctgaagcacatcgacaccaagaagtacaacgtctccatcatcagccccagaagctacttcctgttcacccccctgctgcccagcgcccctgtggggaccgtggacgagaagtccatcatcgagcccatcgtgaacttcgccctgaagaaaaagggcaacgtcacctactacgaggccgaggccaccagcatcaaccccgaccggaacaccgtgaccatcaagagcctgagcgccgtgtcccagctgtaccagcctgagaaccacctaggcctgcaccaagccgagcccgccgaaattaagtacgactatctgatcagcgccgtgggcgccgagcctaacacctttggaatccccggcgtgaccgactacggccacttcctgaaagagattcccaactctctggaaatacggcggaccttcgccgccaatctagaaaaggccaacctgctgcctaagggcgaccccgagcggagaaggctgctgagcatcgtggtcgtgggtggaggccccacaggcgtggaagctgctggcgagctgcaggactacgtgcaccaggacctgcggaagtttttccccgccctggccgaggaagtgcagattcacctggtggaagccctgcccatcgtgctgaacatgttcgagaagaagctgagcagctacgcccagagccacctggaaaacacctccatcaaggtgcacctgagaaccgccgtggccaaggtggaagagaagcagctgctggccaagaccaagcacgaggacggcaagattaccgaggaaaccattccctacggcaccctgatttgggccaccggtaacaaggccagacccgtgatcaccgacctgttcaagaagatccccgagcagaacagcagcaagcggggcctggcagtgaacgacttcctgcaggtcaaaggcagcaacaacatcttcgccatcggcgacaacgcctttgccggcctgcctcctacagcccaggtggcccaccaagaggccgagtacctggccaagaactttgacaagatggcccagatccccaatttccagaagaacctgtcctcccggaaggataagatcgacctcctgttcgaggaaaacaacttcaagcccttcaagtacaacgacttaggcgccctggcctacctgggcagcgaaagagccattgccaccatccgtagcggcaagcggaccttctacaccggcggaggcctgatgaccttctacttatggcggatcctgtacctgagcatgatcctgagcgcccgctcgagactgaaggtgttcttcgactggatcaagatggccttcttcaagagggacttcttcaaaggcctgtga

SEQ ID NO: 310 - DNA, 1542 bp, Artificial Sequence
  source: /note="Description of Artificial Sequence: Synthetic polynucleotide"
atgctgagcaagaacctgtacagcaacaagcggctgctgaccagcaccaacaccatggtgcgcttcgccagcaccagatccaccggcgtcgaaaacagcggggctggccccaccagcttcaagaccatgaaggtcatcgacccccagcacagcgacaagcccaacgtgctgatcctgggctctggctggggcgctatcagctttctgaagcacatcgacaccaagaagtacaacgttagcatcatcagccccagaaagtacttcctgcacacccccctgctgcccagcgccccagtgggaaccgtagacgaaaagtccatcatcgagcccatcgtgaacttcgctctcaagaaaaagggcaacgtcacctactacgaggccgaggccaccagcatcaaccccgaccggaacaccgtgaccataaaaagcctgagcgccgtgtcccagctgtaccagcccgagaaccacctgggcctgcaccaggccgagcccgccgaaattaagtacgactacctgatcagcgccgtgggcgccgagcccaacacctttggaatccccggcgtgaccgactacggccacttcctgaaagaaatccccaacagcctggaaatccggcggaccttcgccgccaacctggaaaaggccaacctgctgcctaagggcgaccccgagcggagaaggctgctgagcattgtggtcgtgggcggaggccccacaggcgtggaagctgctggcgaactgcaggactacgtgcaccaggacctgagaaagttcctgcccgccttggccgaagaagtgcaaattcacctggtggaagccctgcccatcgttctgaacatgttcgagaagaagctgagcagctacgcccagagccacctggaaaacacctccatcaaggtgcacctgagaaccgccgtggccaaggtggaagagaagcagctgctggccaagaccaaacacgaggacggcaaaattaccgaggaaaccatcccctacggcaccttgatttgggccaccggcaacaaggccagacccgtgatcaccgacctgttcaagaagatccccgagcagaacagcagcaagagaggcctggcagtgaacgacttcctgcaggtcaaaggcagcaacaacatcttcgccatcggcgacaacgcctttgccggcctgcctcctacagcccaggtggcccaccaggaagccgagtacctggccaagaacttcgacaagatggcccagatccccaatttccagaagaacctgtcctcccggaaggataaaatcgacctgctgttcgaggaaaacaactttaagcccttcaagtacaacgacctgggtgccctggcctacctgggcagcgaaagagccattgcaaccatcagaagcggcaagcggaccttctacaccggcggaggcctgatgaccttctacctgtggcggatcctgtacctgagcatgatcctgagcgcccgcagcagactgaaggtgttcttcgactggatcaagctggccttcttcaaaagggacttcttcaaaggcctgtga

SEQ ID NO: 311 - DNA, 1542 bp, Artificial Sequence
  source: /note="Description of Artificial Sequence: Synthetic polynucleotide"
atgctgagcaagaacctgtacagcaacaagcggttgctgaccagcaccaacaccctcgtgcgcttcgccagcaccagatccaccggcgtcgaaaacagcggggctggccccacctctttcaagaccatgaaggtcatcgacccccagcacagcgacaagcccaacgtgctgatcctgggctctggctggggcgctatcagctttctgaagcacatcgacaccaagaagtacaacgtcagcatcatcagccccagaagctacttcctgttcacccccctgatgccctctgcccctgtgggaaccgtggacgaaaagtccatcatcgagcccatcgtgaacttcgccctgaagaaaaagggcaacgtcacctactacgaggccgaggccaccagcatcaaccccgaccggaataccgtgaccatcaagagcctgagcgccgtgtcccagctgtaccagcccgagaaccacctgggcctgcaccaggccgaacccgccgagattaagtacgattacctgatcagcgccgtgggcgccgagcccaacacctttggtattcccggcgtgaccgactacggtcacttcttcaaagagatccccaacagcctggaaatcagacggaccttcgccgccaatctggaagaggccaacctgctgcctaagggcgaccccgagcggagaaggctgctgtccatcgtggtcgtgggcggaggccctacaggtgtggaagctgctggcgagctgcaggactacgtgcaccaggacctgcggaagttcctgcccgccctggccgaggaagtgcaaattcacctggtggaagccctgcccatcgtgctgaacatgttcgagaagaagctgagcagctacgcccagtcacacctggaaaacacctccatcaaagtgcacctgagaaccgccgtggccaaagtggaagagaagcagctgctggccaagaccaagcacgaagacggcaagattaccgaggaaaccatcccatacggcaccctgatttgggccaccggcaacaaggccagacccgtgatcaccgaccttttcaagaagatccccgagcaaaacagcagcaagcggggcctggccgtgaacgacttcctgcaggtcaaaggcagcaacaacatcttcgccatcggcgacaacgcctttgccggcctgcctcctacagcccaggtggcccaccaggaagccgagtacctggccaagaacttcgataagatggcccagatccccaatttccagaagaacctgtcctcccggaaggataagatcgatctgctgttcgaggagaacaacttcaagcccttcaagtacaacgacctgggcgccctggcctacctgggcagcgaaagagccattgccaccatcagaagcggcaagcggaccttctacaccggcggaggcctgatgaccttctacctgtggcggatcctgtacctgagcatgatcctgagcgcccgcagcagactgaaggtgttcttcgactggatcaagctggccttcttcaagagggacttcttcaagggactgtag

SEQ ID NO: 312 - DNA, 1542 bp, Artificial Sequence
  source: /note="Description of Artificial Sequence: Synthetic polynucleotide"
atgctgagcaagaacctgtacagcaacaagcggctgctgaccagcaccaacaccctagtgcgcttcgccagcaccagatccaccggcgtcgaaaacagcggggctggccccaccagcttcaagaccatgaaggtcatcgacccccagcacagcgacaagcccaacgtgctgatcctgggctcgggctggggcgccatctcgtttctgaagcacatcgacaccaagaagtacaacgtcagcatcatcagccccagaagctacttcctgttcacccccctgttacccagcgcccctgtggggaccgtagacgaaaagtccattattgagcccatcgtgaacttcgctctgaagaaaaagggcaacgttacctactacgaggccgaggccaccagcatcaaccccgaccggaacaccgtgaccatcaagagcctgagcgccgtgtcccagctgtaccagcccgagaaccacctgggcatgcaccaggccgagcccgccgagattaagtacgattacctgatcagcgccgtaggcgccgaacccaacacctttggaatccccggggtgaccgactacggccacttcttcaaagagatccccaacagcctggaaatccggcggaccttcgccgccaacctggaaaaggccaacctgctgcctaagggcgaccccgaacggagaaggctgctgagcatcgtggtcgtgggcggaggccccacaggcgtggaagctgctggtgagctgcaggactacgtgcaccaggacctgcggaagtttctccccgccctggccgaggaagtgcagattcacctggtggaagccctgcccatcgtgctgaacatgttcgagaagaagctgagcagctacgcccagagccacctggaaaacacttccatcaaggtgcacctgagaaccgccgtggccaaggtggaagagaagcagctgctggccaagaccaagcacgaggacggcaagattaccgaggaaaccatcccctacggcaccctgatttgggccaccggcaacaaggccagacccgtgatcaccgacctgttcaagaagatccccgagcagaacagcagcaagcggggcctggccgtgaacgacttcctgcaggtgaaaggcagcaacaacatcttcgccatcggcgacaacgcctttagcggcctgcctcctacagcccaggtggcccaccaggaagccgagtacctggccaagaacttcgataagatggcccagatccccaatttccagaagaacctgtcctcaagaaaggataagatcgacctgctgttcgaggaaaacaacttcaagcccttcaagtacaacgacctgggcgccctggcctacctgggcagcgaaagagccattgccaccatcagaagcggcaagcggacattctacaccggtggaggcctgatgaccttctacctgtggcggatcctgtacctgagcatgatcctgagcgccagaagcagactgaaggtgttcttcgactggatcaagctggccttcttcaagagagacttcttcaaaggcctgtga

SEQ ID NO: 313 - DNA, 1542 bp, Artificial Sequence
  source: /note="Description of Artificial Sequence: Synthetic polynucleotide"
atgctaagcaagaacctgtacagcaacaagcggctgctgaccagcaccaataccctcgtgcgcttcgccagcaccagatccaccggcgtcgaaaacagcggggcaggccccaccagcttcaagaccatgaaagtcatcgacccccagcacagcgacaagcccaacgtgctgatcctgggttctggctggggcgccatcagctttctgaagcacatcgacaccaagaagtacaacgtcagcatcatcagccccagaaagtacttcctgttcacccccctgctgcccagcgcccctgtgggaaccgtggacgagaagtccatcatcgagcccatcgtgaacttcgccctgaagaaaaagggcaacgtcacctactacgaggcagaagccaccagcatcaaccccgaccggaataccgtgaccatcaagtcactgagcgccgtgtcccagctgtaccaacccgagaaccatctgggcctgcaccaggccgagcccgccgagattaagtacgattacttaatcagcgccgtgggcgccgagcccaacacctttggtatccccggcgtgaccgattacggccacttcctgaaagagatccccaacagcttggaaatccggcggacctttgccgccaatctggaaaaggccaacctgttgcctaagggcgaccccgagcggagaaggctgctgagcattgtggtcgtgggcggaggccccacaggcgtggaagctgctggcgagctgcaggactacgtgcaccaggacctgcggaagttcttccctgccctggccgaggaagtccagattcacctggtggaagccctgcccatcgtgctgaacatgttcgagaagaagctgtcaagctacgcccagagccacctggaaaacacttccatcaaggtgcacctgagaaccgccgtggccaaggtggaagagaagcagctgctggccaagaccaagcacgaggacggcaagattaccgaggaaaccatcccctacggcaccctgatttgggccaccggcaacaaggccagacccgtgatcaccgacctgttcaagaagatccccgagcagaacagcagcaagcggggcctggcagtgaacgacttcctgcaggtcaaaggcagcaacaacatcttcgccatcggcgacaacgcctttgccggcctgcctcctacagcccaggtggcccaccaggaagccgagtacatcgccaagaacttcgacaagatggcccagatccccaatttccagaagaatctgtcctcccggaaggataagattgacctcctgttcgaggaaaacaacttcaagcccttcaagtacaacgacctgggcgccctggcctacctgggcagcgaaagagccattgccaccatcagaagcggcaagcggaccttctacaccggcggaggcctgatgaccttctacctgtggcggatcctgtacctgagcatgatcctgagcgcccgcagcagactgaaggtgttcttcgactggatcaagctggccttcttcaagagggacttcttcaagggcctgtag

SEQ ID NO: 314 - DNA, 1542 bp, Artificial Sequence
  source: /note="Description of Artificial Sequence: Synthetic polynucleotide"
atgctgagcaagaatctgtacagcaacaagcggctgctgaccagcaccaacaccctcgtgcgcttcgcctccaccagatccaccggcgtcgaaaacagcggagctggccccaccagcttcaagaccatgaaggtcatcgacccccagcacagcgacaagcccaacgtgctgatcctgggctctggctggggcgccatcagctttctgaagcacatcgacaccaagaagtacaacgtcagcatcatcagccccagaaagtatttcctgcacacccccctgctgcccagcgcccctgtgggaaccgtggacgagaagtccattatcgagcccatcgtgaacttcgccctgaagaaaaaggggaacgtcacctactacgaggccgaggccaccagcatcaatcccgaccggaacaccgtgaccatcaagaacctgagcgccgtgtcccagctgtaccagcccgagaaccacctgggcctgcaccaggccgagcccgccgaaattaagtacgactacttaatcagcgccgtgggcgccgagcccaacacctttggaatccccggcgtgaccgactacggccacttcctgaaagagatccccaacagcctggaaatccggcggaccttcgccgccaacctggaaaaggccaacctgctgcctaagggcgaccccgagcggagaaggctgctgagcatcgtggtcgtgggcggaggccctacaggtgtggaagctgctggcgagctgcaggattacgtgcaccaggacctgcggaagttcctccccgccctggccgaggaagtccagattcacctggtggaagccctgcccatcgtgctgaacatgttcgagaagaagcttagcagctacgcccagagccacctggaaaacacctccatcaaagtgcacctgagaaccgccgtggccaaggtggaagagaagcagctgctggcaaagaccaagcacgaggacggcaagattaccgaagaaaccatcccctacggcaccctgatttgggccacgggtaacaaggccagacccgtgatcaccgacctgttcaagaagatccccgagcagaacagcagcaagcggggcctggccgtgaacgacttcctgcaggtcaaaggcagcaacaacatcttcgccatcggcgacaacgcatttgccggcctgcctcctacagcccaggtggcccaccaggaagccgagtacctggccaagaacttcgacaagatggcccagatccccaatttccagaagaacctgtcctcccggaaggataaaatcgatctgttgttcgaggaaaacaacttcaagcccttcaaatacaacgacctgggcgccctggcctacctgggcagcgaaagagccattgcaaccatcagaagcggcaagcggaccttctacaccggcggaggcctgatgaccttctacctgtggcggatcctgtacttgagcatgatcctgagcgccagaagcagactgaaggtgttcttcgactggatcaaactggccttcttcaagagggacttcttcaagggcctgtga

SEQ ID NO: 315 - DNA, 1542 bp, Artificial Sequence
  source: /note="Description of Artificial Sequence: Synthetic polynucleotide"
atgctgagcaagaacctgtacagtaacaagcggctgctgaccagcacgaacaccctcgtgcgcttcgccagcaccagatccaccggcgtcgaaaacagcggggctggccccaccagcttcaagaccatgaaggtcatcgacccccagcacagcgacaagcccaacgtgctgatcctgggctcggggtggggcgccatcagctttctgaagcacattgacaccaagaagtacaacgtcagcatcatcagccccagaaagtacttcctgttcacccccctgctgcccagcgcccctgtgggaaccgtggacgaaaagtccatcatcgagcccatcgtgaacttcgccctgaagaaaaagggcaacgtcacctactacgaggccgaggccaccagcatcaatcccgaccggaacaccgtgaccatcaagaacctgagcgccgtgtcccagctgtaccagcccgaaaaccacctgggcctgcaccaggccgagcccgccgagattaagtacgactacctgatcagcgccgtgggcgccgagcccaacacctttggaatccccggcgtgaccgactacggccacttcctgaaagagatccccaacagcctggaaatccggcggaccttcgccgccaacctagaaaaggccaacctgttgcctaagggcgaccccgagcggagaaggctactgagcatcgtggtcgttggcggaggccctacaggcgtggaagctgctggcgagctgcaggactacgtgcaccaggacctgcggaagttcctgcctgccctggccgaggaagtgcagattcacctggtggaagccctgcccatcgttctgaacatgttcgagaagaagctgagcagctacgcccagagccacttagaaaacacctccatcaaggtgcacctgagaaccgccgtggccaaggttgaagagaagcaactgctggccaagaccaagcacgaggacggtaagattaccgaggaaaccatcccctacggcaccctgatttgggccaccggcaacaaggccagaccggtgatcaccgacctgttcaagaagatccccgagcagaacagcagcaagcggggcctggccgtgaatgacttcctgcaggtcaaaggcagcaacaacattttcgccatcggcgacaacgcctttgccggcctgcctcctacagcccaggtggcccaccaggaagccgaatacctggccaagaacttcgacaagatggcccagatccccaatttccagaagaacctgtcctcccggaaggataaaatcgacctgctgttcgaggaaaacaacttcaagcctttcaagtacaacgacctgggcgccttagcctacctgggcagcgaaagagccattgccaccatcagaagcggcaagcggaccttctacaccggcggaggcctgatgaccttctacctgtggcagatcctgtacctgtccatgatcctgagcgcccgcagcagattaaaggtgttcttcgactggatcaagctggccttcttcaagagggacttcttcaaaggcctgtga

SEQ ID NO: 316 - DNA, 1542 bp, Artificial Sequence
  source: /note="Description of Artificial Sequence: Synthetic polynucleotide"
atgctgagcaagaacctgtacagcaacaagcggctgctgaccagcaccaacaccctcgtgcgcttcgccagcaccagatccaccggcgtcgaaaacagcggggctggccccaccagcttcaagaccatgaaggtcattgaccctcagcacagcgacaagcccaacgtgctgatcctgggctctggctggggcgccatcagctttctgaagcacatcgacaccaagaagtacaacgtcagcatcatcagccccagaagctacttcctgttcacccccctgctgcccagcgcccctgtgggaaccgtggacgagaagtccatcatcgagcccatcgtgaacttcgctctgaagaaaaaggggaacgtcacctactacgaggccgaggccaccagcatcaaccccgaccggaacaccgtgaccataaagtcactgagcgccgtgtcccagctgtaccagcctgagaaccacctaggcctgcaccaggccgagcccgccgagattaagtacgactatctgatcagcgccgtaggtgccgagcccaacacatttggaattcccggcgtgaccgactacggccacttcttcaaagagatccccaacagcctggaaatccggcggaccttcgccgccaacctggaagaggccaacttattgcctaagggcgaccccgagcggagaaggctgctgtccatcgtggtcgtgggcggaggccccacaggcgtggaagctgctggcgagctgcaggactacgttcaccaggacctgcggaagttcctgcccgccctggccgaggaagtgcaaattcacctggtggaagccctgcccatcgtgctgaacatgtttgagaagaagctgagcagctacgcccagagccacctggaaaacacctccatcaaggtgcacctgagaaccgccgtggccaaggttgaagagaagcagctgctggccaagaccaagcacgaggacggcaagattaccgaggaaaccatcccctacggcaccctgatttgggccacgggcaacaaggccagacccgtgatcaccgacctgttcaagaagatccccgagcagaacagcagcaagcggggcctggccgtgaacgacttcctgcaggtcaaaggcagcaacaacatcttcgccatcggcgacaacgcctttgccggcctgccacctacagcccaggtggcccaccaggaggccgagtacatcgccaagaacttcgacaagatggcccagatccccaatttccagaagaacctgtcctcacggaaggataagatcgacctgctgttcgaggagaacaacttcaagcccttcaagtacaacgacctgggcgccctggcctacctgggcagcgaaagagccattgccaccatcagaagcggtaagcggaccttttacaccggcggaggcctgatgaccttctacctgtggcggatcctgtacctgagcatgattctgagcgcccgcagcagactgaaggtgttcttcgactggatcaagttagccttcttcaagagggacttcttcaagggcctgtga

SEQ ID NO: 317 - DNA, 1542 bp, Artificial Sequence
  source: /note="Description of Artificial Sequence: Synthetic polynucleotide"
atgctgagcaagaacttgtatagcaacaagcggctgctgaccagcacgaacaccatggtgagattcgctagcaccagatccaccggggtcgaaaacagcggggctggccccaccagcttcaagaccatgaaggtcattgacccccagcacagcgacaagcccaacgtgctgatactgggctctggctggggcgctatcagctttttaaagcacatcgacaccaagaagtacaacgtcagcatcatctctcccagaagctacttcctgttcacccccctgctgcccagcgccccagtgggaaccgtggacgagaagtccatcatcgagcccatcgtgaacttcgccctgaagaaaaagggcaacgtcacctactacgaggccgaagccaccagcatcaatcccgaccggaacaccgtgaccatcaagagcctgagcgccgtgtcccagctgtaccagcccgagaaccacctgggcctgcaccaggccgagcccgccgagattaagtacgactacctgatcagcgccgtgggcgccgagcctaacacctttggaatccccggcgtgaccgactacggtcacttcctgaaagagatccccaacagcctggaaatccggcggaccttcgccgccaacctggaagaggccaacctgctgcctaagggcgatcccgagcggagaaggctgctgagcatcgtggtcgtgggcggaggccccacaggcgtggaagccgctggcgagctgcaggactacgtgcaccaggacctgcggaagttcctgcccgccctggccgaggaagtgcagattcacctggtggaagccctgcccatcgtgctgaacatgttcgagaagaagctgagcagctacgcccagagccacctggaaaacacctccatcaaggtacacctgagaaccgccgtggccaaggtggaagagaagcaactgctggccaagaccaagcacgaggacggcaagattaccgaggaaaccatcccctacggcaccctgatttgggccaccggcaacaaggccagacccgtgatcaccgacctgttcaagaagatccccgagcagaacagcagcaagcggggcctggccgtgaacgacttcctgcaggtcaaaggcagcaacaacatcttcgccatcggcgacaacgcctttgccgggctgccacctacagcccaggtggcccaccaggaagccgagtacctggccaagaacttcgacaagatggcccagatccccaatttccagaagaacctgtcctcccggaaggataagatcgacctcctgttcgaggaaaacaacttcaagcccttcaagtacaacgacctgggcgccctggcctacctgggcagcgaaagagccattgccaccatcagaagcggcaagcggaccttctacaccggcggaggcctgatgaccttctacctgtggcggatcctgtacctgagcatgatcctaagcgcccgcagcagattaaaggtgttcttcgactggattaaactggccttcttcaagagggactttttcgagggcttatga

SEQ ID NO: 318 - DNA, 1542 bp, Artificial Sequence
  source: /note="Description of Artificial Sequence: Synthetic polynucleotide"
atgctgagcaagaacctgtacagcaacaagcggctgctgaccagcaccaacaccatggtgcgcttcgccagcaccagatccaccggcgtggaaaacagcggggctggccctacaagcttcaagaccatgaaggtcatcgacccccagcacagcgacaagcccaacgtgctgatcctgggctctggctggggcgccatcagctttctgaagcacatcgacaccaagaagtacaacgtcagcatcatcagccccagaagctacttcctgttcacccccctgatgcccagcgcccctgtgggaaccgtggacgagaagtccatcatcgagcccatcgtgaactttgccctgaagaaaaagggcaacgtcacctactacgaggccgaggccacctctatcaatcccgaccggaacaccgtgaccatcaagagcctgagcgccgtgtcccagctgtaccagcccgagaaccacctggggctgcaccaggccgagcccgccgagattaagtacgactacctgatcagcgccgtaggcgccgagcccaacacctttggaatccccggcgtgactgactacggccacttcctgaaagagatccccaacagcctggaaatccggcggaccttcgccgccaacctggaaaaggccaacctgttgcctaagggcgaccccgagcggagaaggctgctgagcatcgtggtcgtgggcggaggccccacaggcgtggaagctgctggtgagctgcaggactacgtgcaccaggacctgcggaagttcctgcccgccctggccgaggaagtccagattcacctggtggaagccctgcccatcgttctgaacatgttcgagaaggagctgtcaagctacgcccagagccacctggaaaacacctccatcaaggtgcatctgagaacggccgtcgccaaggtggaagagaagcagctgctggccaagaccaagcacgaggacggcaagattaccgaggaaaccatcccctacggtaccctgatttgggccaccggcaacaaggccagacccgtgatcaccgacctgttcaagaaaatccccgagcagaacagcagcaagcggggcctggccgtgaacgacttcctgcaggtcaaaggcagcaacaacatcttcgccatcggcgacaacgcctttgccggcctgcctcctacagcccaggtggcccaccaagaagccgagtacctggccaagaacttcgacaagatggcccagatccccaatttccagaagaacctatcttcccggaaggataagatcgacctgctgttcgaggaaaacaacttcaagcccttcaagtacaacgacttaggcgccctggcctacctgggcagcgaaagagccattgcaaccatcagaagcggcaagagaaccttctacaccggcggaggcctgatgaccttctacctgtggcggatcctgtacttgagcatgatcctgagcgcccgcagcagattaaaggtgttcttcgactggattaagttagccttcttcaagagggacttcttcaagggcctgtga

SEQ ID NO: 319 - DNA, 1542 bp, Artificial Sequence
  source: /note="Description of Artificial Sequence: Synthetic polynucleotide"
atgctgagcaagaacttgtacagcaacaagcggctgctgaccagcaccaacaccatggtgcgcttcgccagcaccagatccaccggcgtcgaaaacagcggggctggtcccaccagcttcaagaccatgaaggtcatcgacccccagcacagcgacaagccaaacgtgctgatcctgggctctggctggggcgccatcagctttctgaagcacatcgacaccaagaagtacaacgtctccatcatctctcccagaagctacttcctgttcacccccctgctgcccagcgcccctgtgggaaccgtggacgagaagtccatcatcgagcccatcgtgaatttcgccctgaagaaaaagggcaacgtcacctactacgaggccgaagccaccagcatcaaccccgaccggaacaccgtgaccatcaagagcctgtctgccgtgtcccagctgtaccagcccgagaaccacctgggcctgcaccaggccgagcccgccgaaattaagtacgactacctgatcagcgccgtgggcgccgagcccaacacatttggaatccccggcgtgaccgactacggccacttcctggaggagatccccaacagcctggaaatccggcggaccttcgccgccaacctggaaaaggccaacctgttgcctaagggtgaccccgagcggagaagactactgagcatcgtggtcgtgggcggagggcctactggcgtggaagctgctggcgagctgcaggactacgtgcaccaggacctgagaaagttcctgcccgccctggccgaggaagtgcagattcacctggtggaagccctgcccatcgtgctgaacatgttcgagaagaagcttagcagctacgcccagagccacttagaaaacacctccatcaaggtgcacctgagaaccgccgtggccaaggtggaagagaagcagctgctggccaagaccaagcacgaggacggcaagattaccgaggaaaccatcccctacggcaccctgatttgggccaccggcaacaaggcaagacccgtgatcaccgacctgttcaagaagatccccgagcagaacagcagcaagagaggcctggccgtgaacgacttcctgcaggtcaaaggcagcaacaacatcttcgccatcggcgacaacgcctttgccggcctgcctcctacagcccaggtggcccaccaggaagccgagtacctggccaagaacttcgacaagatggcccaaatccccaatttccagaagaacctgtcctcccggaaggataagatcgatctgctgttcgaggaaaacaacttcaagcccttcaagtacaacgacctgggcgccctggcatacctgggaagcgaaagagccattgccaccatcagaagcggcaagcggaccttctacaccggcggaggcctgatgaccttctacctgtggcagattctgtacctgagcatgatcctgtctgcccgcagcagattaaaggtgttcttcgactggatcaagctggccttcttcaagagggacttcttcaagggcctgtga

SEQ ID NO: 320 - DNA, 1542 bp, Artificial Sequence
  source: /note="Description of Artificial Sequence: Synthetic polynucleotide"
atgctgagcaagaacctgtacagcaacaagcggctgctgaccagcaccaacaccctcgtgcgcttcgccagcaccagatccaccggggtcgaaaacagcggggctggccccaccagcttcaagaccatgaaggtcatcgacccccagcacagcgacaagcccaacgtgctgatactgggctctggctggggcgccatctcgtttctgaagcacatcgacaccaagaagtacaacgtcagcatcatctctcccagaagctacttcctgttcacccctctgctgcccagcgcccctgtgggaaccgtggacgagaagtcaatcatcgagcccatcgtgaacttcgccctgaagaaaaagggcaacgtcacctactacgaggccgaggccaccagcatcaaccccgaccggaacaccgtgaccatcaagagcctgagcgccgtgtcccagctataccagcccgagaaccacctgggcctgcaccaggccgagcccgccgagattaagtacgactacctgatcagtgccgtaggcgccgagcccaacacctttggaattcccggcgtgaccgactacggccacttcctgaaagagatccccaacagcctggaaatccggcggaccttcgccgccaacctggaaaaggccaacctgctgcctaagggcgaccccgaaagaagaaggctactgagcatcgtggtggtgggcggaggccccacaggcgtggaagctgctggcgagctgcaggactacgtgcaccaggacctgcggaagttcctgcccgcactggccgaggaagtgcagattcacctggtggaagccctgcccatcgtgctgaacatgttcgagaagaagctgagcagctacgcccagagccacctggaaaacacctccatcaaggtgcacctgagaaccgccgtggccaaggtggaagagaagcagctgctggccaagaccaagcacgaggacggcaagattaccgaggaaaccatcccctacggcaccctgatttgggccaccggcaacaaggccagacccgtgatcaccgacctgttcaagaaaattcccgagcaaaacagcagcaagcggggcctggccgtgaacgacttcttgcaggtcaaaggcagcaacaacatcttcgccatcggcgacaacgcctttagcggcctgcctcctaccgcccaggtggcccaccaggaagccgaatatatcgccaagaacttcgacaaaatggcccagatccccaatttccagaagaacctgtcctcccggaaggataagatcgatctgctgttcgaggaaaacaacttcaagcccttcaagtacaacgacctgggcgccctggcctacctgggcagcgaaagagccattgccaccatcagaagcggcaagcggaccttctacaccggtggtggcctgatgaccttctacctgtggcagatcctgtacctgtccatgatcctgagcgcccgcagcagactgaaggtgtttttcgactggatcaagctggccttcttcaagagggacttcttcaagggcctgtga

SEQ ID NO: 321 - DNA, 1542 bp, Artificial Sequence
  source: /note="Description of Artificial Sequence: Synthetic polynucleotide"
atgctgagcaagaacctgtacagcaacaagcggctgctgaccagcaccaacaccctcgtgcgcttcgcttccaccagatccaccggcgtcgaaaactccggggctggccccaccagcttcaagaccatgaaggtcatcgacccccagcacagcgacaagcccaacgtgctgatcctgggctctggctggggcgccatcagctttctgaagcacatcgacaccaagaagtacaacgtcagcatcatctctcccagaaagtacttcctgttcacccccctgctgcccagcgcccctgtggggaccgtggacgagaagtccatcatcgagcccatcgtgaacttcgccctcaagaaaaagggcaacgtcacctactacgaggccgaggccaccagcatcaaccccgaccggaacaccgtgaccatcaagagcttaagcgccgtgtcccagctgtaccagcccgagaaccacctgggcctgcaccaagccgagcccgccgaaattaagtacgactacctgatcagcgccgtgggcgccgagcccaacacctttggaatccccggcgtgaccgactacggccacttcctgaaagagatccccaacagcctggaaatcagacggactttcgccgccaacctggaagaggccaacctgctgcctaagggcgaccccgagcggagaaggctgctgagcatcgtggtcgtgggtggaggccccacaggcgtggaagctgctggcgagctgcaggactacgtgcaccaggacctgcggaagttcctccccgccttggccgaggaagtgcagattcacctggtggaagccctgcccatcgtgctgaacatgttcgagaaggagctgtcaagctacgcccagagccacctggaaaacacctcgatcaaggtgcacctgagaaccgccgtggccaaggtggaagagaagcagctgctggccaagaccaagcacgaggacggcaagattaccgaggaaaccatcccctacggtaccctgatttgggccaccggcaacaaggccagacccgtgatcaccgacctgttcaagaagatccccgagcagaacagcagcaagcggggcctggcagtgaacgacttcctgcaggtcaaaggcagcaacaacatcttcgccatcggcgacaacgcctttgccggcctgcctcctaccgcccaggtggcccaccaggaagccgagtacttggccaagaactttgataagatggcccaaatccccaatttccagaagaacctgtcctcccggaaggataagatcgacctcctgttcgaggagaacaacttcaagcccttcaagtacaacgacctgggcgccctggcctacctgggcagcgaaagagccattgccaccatccgtagcggcaagcggaccttctacaccggcggaggcttaatgaccttctacctgtggcggatcctgtacctgagcatgatcctgagcgcccgcagcagactgaaggtgttcttcgactggattaagctggccttcttcaagagggacttcttcaagggcttatga

SEQ ID NO: 322 - DNA, 1542 bp, Artificial Sequence
  source: /note="Description of Artificial Sequence: Synthetic polynucleotide"
atgctgagcaagaacctgtacagcaacaagcggttgctgaccagcaccaacaccatggtgcgcttcgccagcaccagatccaccggcgtcgaaaacagcggagctggtcccacctctttcaagaccatgaaggtcatcgacccccagcacagcgacaagcccaacgtgctgatcctgggctctggctggggcgccatcagctttctgaagcacattgacaccaagaagtacaacgtcagcatcatcagccccagaagctacttcctgttcacccccctgctgccttctgcccctgtgggaaccgtggacgagaagtccatcattgagcccatcgtgaactttgccctgaagaaaaagggcaacgttacctactatgaggccgaggccaccagcatcaaccccgaccggaacaccgtgaccatcaagagcctgagcgccgtgtcccagctgtaccagcccgagaaccatctgggcctgcatcaggccgagcccgccgagattaagtacgactacttaatcagcgccgtgggcgccgagcccaacacctttggaatccccggcgtgaccgactacggccacttcctgaaagagatccccaacagcctggaaatccggcggaccttcgccgccaacctggaaaaggccaacctgctgcctaagggcgaccccgagcggagaaggctgctgagcatcgtggtcgtgggcggaggccccacaggcgtggaagctgctggtgagctgcaggactacgtgcaccaggacctgagaaagttcctgcccgccctggccgaggaagtgcagattcacctggtggaagccctgcccatcgtgctgaacatgttcgagaaggagctgagcagctacgcccagagccacctggaaaacacctcgatcaaggtgcacctgagaaccgccgtggccaaggtggaagagaagcagttgctggccaagaccaaacacgaggacggcaagattaccgaggaaaccatcccctacggcactctgatttgggccaccggcaacaaggccagacccgtgatcactgacctgttcaagaagatccccgagcagaacagcagcaagcggggactggccgtgaacgacttcctgcaggtcaaaggcagcaacaacatcttcgccatcggcgacaacgcctttgccggcctgcctcctacagcccaggtggcccaccaggaagccgaatacctggccaagaacttcgacaagatggcccagatcccaaatttccagaagaacctgtcctcccggaaggataagatcgacctgctgttcgaggaaaacaacttcaagcccttcaagtacaacgacctgggtgccctggcctacctgggcagcgaaagagccattgccaccatcagaagcggcaagcggaccttctacaccggtggaggcctgatgaccttctacttatggcggatcttgtacctgagcatgatcctgagcgcccgcagcagactgaaggtgttcttcgactggatcaagatggccttcttcaagagggacttcttcaaaggcctgtga

SEQ ID NO: 323 - DNA, 1542 bp, Artificial Sequence
  source: /note="Description of Artificial Sequence: Synthetic polynucleotide"
atgctgagcaagaacctgtacagcaacaagcggctgctgacctcgacgaacaccctcgtgcgcttcgccagcaccagatccaccggcgtcgaaaacagcggggctggccccaccagcttcaagaccatgaaggtcatcgacccccagcacagcgacaagcccaacgtgctgatactgggctctggctggggcgccatcagctttctgaagcacatcgacaccaagaagtacaacgtcagcatcatcagccccagaaagtacttcctgttcacccccctgatgccctctgcccctgtgggaaccgtggacgagaagtccatcatcgagcccatcgttaacttcgccctgaagaaaaagggcaacgtcacctactacgaggccgaggccacctctatcaaccccgaccggaacaccgtgaccataaagagcctgagcgccgtgtcccagctataccagcccgagaaccacctgggcctgcaccaagccgagcccgccgagattaagtacgactacctgatcagcgccgtgggcgccgagcccaacacctttggaattcccggggtgaccgactacggccacttcctgaaagagatccccaacagcctggaaatccggcggacctttgccgccaacctggaaaaggccaacctgctgcctaagggcgaccccgagcggagaaggctgctgagcatcgtggtcgtgggcggtggccccacaggcgtggaagctgctggcgagctgcaggactacgtgcaccaggacctgcggaagttcctgcccgcactggccgaagaagtgcagattcacctggtggaagccctgcccatcgtgctgaacatgtttgagaagaagctgagcagctacgcccagtcacacctggaaaacacctccatcaaggtgcacctgagaaccgccgtggccaaggtggaagagaagcaactgctggccaagaccaagcacgaggacggcaagattaccgaggaaaccatcccctacggtaccctgatttgggccaccggcaacaaggccagacccgtgatcaccgacctgttcaagaagatccccgagcagaacagcagcaagagaggcctggccgtgaacgacttcctgcaggtcaaaggcagcaacaacatcttcgccatcggcgacaacgcctttgccggcctgcctcctacagcccaggtggcccaccaggaagccgagtacctggccaagaacttcgacaagatggctcagatccccaatttccagaagaacctgtcctcccggaaggataaaatcgacctgttgttcgaggaaaacaacttcaaacccttcaagtacaacgacctgggcgccctggcctacctgggcagcgaaagagccattgccaccatcagaagcggcaagagaaccttctacaccggcggaggcctgatgaccttctacctgtggcagatcttgtacctgagcatgatcctgtctgccagaagcagactgaaggtgttcttcgactggatcaagctggccttcttcaagagggactttttcaagggcctgtga

SEQ ID NO: 324 - DNA, 1542 bp, Artificial Sequence
  source: /note="Description of Artificial Sequence: Synthetic polynucleotide"
atgctgagcaagaacctgtacagcaacaagcggctgctgaccagcaccaacaccctcgtgcgcttcgccagcaccagatccaccggcgtcgaaaacagcggggctggccccaccagcttcaagaccatgaaggtcatcgacccccagcacagcgacaagcccaacgtgctgatcctgggctctggctggggcgccatcagctttctgaagcacatcgacaccaagaagtacaacgtcagcatcatcagccccagaaagtacttcctgttcacccccctgctgcccagcgcccctgtgggaaccgtggacgagaagtccatcatcgagcccatcgtgaacttcgccctgaagaaaaagggcaacgtcacctactacgaggccgaggccaccagcatcaaccccgaccggaacaccgtgaccatcaagagcctgagcgccgtgtcccagctgtaccagcccgagaaccacctgggcatgcaccaggccgagcccgccgagattaagtacgactacctgatcagcgccgtgggcgccgagcccaacacctttggaatccccggcgtgaccgactacggccacttcctgaaagagatccccaacagcctggaaatccggcggaccttcgccgccaacctggaaaaggccaacctgctgcctaagggcgaccccgagcggagaaggctgctgagcatcgtggtcgtgggcggaggccccacaggcgtggaagctgctggcgagctgcaggactacgtgcaccaggacctgcggaagttcctgcccgccctggccgaggaagtgcagattcacctggtggaagccctgcccatcgtgctgaacatgttcgagaagaagctgagcagctacgcccagagccacctggaaaacacctccatcaaggtgcacctgagaaccgccgtggccaaggtggaagagaagcagctgctggccaagaccaagcacgaggacggcaagattaccgaggaaaccatcccctacggcaccctgatttgggccaccggcaacaaggccagacccgtgatcaccgacctgttcaagaagatccccgagcagaacagcagcaagcggggcctggccgtgaacgacttcctgcaggtcaaaggcagcaacaacatcttcgccatcggcgacaacgcctttagcggcctgcctcctacagcccaggtggcccaccaggaagccgagtacctggccaagaacttcgacaagatggcccagatccccaatttccagaagaacctgtcctcccggaaggataagatcgacctgctgttcgaggaaaacaacttcaagcccttcaagtacaacgacctgggcgccctggcctacctgggcagcgaaagagccattgccaccatcagaagcggcaagcggaccttctacaccggcggaggcctgatgaccttctacctgtggcggatcctgtacctgagcatgatcctgagcgcccgcagcagactgaaggtgttcttcgactggatcaagctggccttcttcaagagggacttcttcaagggcctgtga

SEQ ID NO: 325 - DNA, 1542 bp, Artificial Sequence
  source: /note="Description of Artificial Sequence: Synthetic polynucleotide"
atgctgagcaagaacctgtacagcaacaagcggctgctgaccagcaccaacaccctcgtgcgcttcgccagcaccagatccaccggcgtcgaaaacagcggggctggccccaccagcttcaagaccatgaaggtcatcgacccccagcacagcgacaagcccaacgtgctgatcctgggctctggctggggcgccatcagctttctgaagcacatcgacaccaagaagtacaacgtcagcatcatcagccccagaaagtacttcctgttcacccccctgctgcccagcgcccctgtgggaaccgtggacgagaagtccatcatcgagcccatcgtgaacttcgccctgaagaaaaagggcaacgtcacctactacgaggccgaggccaccagcatcaaccccgaccggaacaccgtgaccatcaagagcctgagcgccgtgtcccagctgtaccagcccgagaaccacctgggcctgcaccaggccgagcccgccgagattaagtacgactacctgatcagcgccgtgggcgccgagcccaacacctttggaatccccggcgtgaccgactacggccacttcctgaaagagatccccaacagcctggaaatccggcggaccttcgccgccaacctggaaaaggccaacctgctgcctaagggcgaccccgagcggagaaggctgctgagcatcgtggtcgtgggcggaggccccacaggcgtggaagctgctggcgagctgcaggactacgtgcaccaggacctgcggaagttcctgcccgccctggccgaggaagtgcagattcacctggtggaagccctgcccatcgtgctgaacatgttcgagaagaagctgagcagctacgcccagagccacctggaaaacacctccatcaaggtgcacctgagaaccgccgtggccaaggtggaagagaagcagctgctggccaagaccaagcacgaggacggcaagattaccgaggaaaccatcccctacggcaccctgatttgggccaccggcaacaaggccagacccgtgatcaccgacctgttcaagaagatccccgagcagaacagcagcaagcggggcctggccgtgaacgacttcctgcaggtcaaaggcagcaacaacatcttcgccatcggcgacaacgcctttgccggcctgcctcctacagcccaggtggcccaccaggaagccgagtacctggccaagaacttcgacaagatggcccagatccccaatttccagaagaacctgtcctcccggaaggataagatcgacctgctgttcgaggaaaacaacttcaagcccttcaagtacaacgacctgggcgccctggcctacctgggcagcgaaagagccattgccaccatcagaagcggcaagcggaccttctacaccggcggaggcctgatgaccttctacctgtggcggatcctgtacatgagcatgatcctgagcgcccgcagcagactgaaggtgttcttcgactggatcaagatggccttcttcaagagggacttcttcaagggcctgtga

SEQ ID NO: 326 - DNA, 1542 bp, Artificial Sequence
  source: /note="Description of Artificial Sequence: Synthetic polynucleotide"
atgctgagcaagaacctgtacagcaacaagcggctgctgaccagcaccaacaccctcgtgcgcttcgccagcaccagatccaccggcgtcgaaaacagcggggctggccccaccagcttcaagaccatgaaggtcatcgacccccagcacagcgacaagcccaacgtgctgatcctgggctctggctggggcgccatcagctttctgaagcacatcgacaccaagaagtacaacgtcagcatcatcagccccagaaagtacttcctgttcacccccctgctgcccagcgcccctgtgggaaccgtggacgagaagtccatcatcgagcccatcgtgaacttcgccctgaagaaaaagggcaacgtcacctactacgaggccgaggccaccagcatcaaccccgaccggaacaccgtgaccatcaagagcctgagcgccgtgtcccagctgtaccagcccgagaaccacctgggcctgcaccaggccgagcccgccgagattaagtacgactacctgatcagcgccgtgggcgccgagcccaacacctttggaatccccggcgtgaccgactacggccacttcctggaggagatccccaacagcctggaaatccggcggaccttcgccgccaacctggaagaggccaacctgctgcctaagggcgaccccgagcggagaaggctgctgagcatcgtggtcgtgggcggaggccccacaggcgtggaagctgctggcgagctgcaggactacgtgcaccaggacctgcggaagttcctgcccgccctggccgaggaagtgcagattcacctggtggaagccctgcccatcgtgctgaacatgttcgagaagaagctgagcagctacgcccagagccacctggaaaacacctccatcaaggtgcacctgagaaccgccgtggccaaggtggaagagaagcagctgctggccaagaccaagcacgaggacggcaagattaccgaggaaaccatcccctacggcaccctgatttgggccaccggcaacaaggccagacccgtgatcaccgacctgttcaagaagatccccgagcagaacagcagcaagcggggcctggccgtgaacgacttcctgcaggtcaaaggcagcaacaacatcttcgccatcggcgacaacgcctttgccggcctgcctcctacagcccaggtggcccaccaggaagccgagtacctggccaagaacttcgacaagatggcccagatccccaatttccagaagaacctgtcctcccggaaggataagatcgacctgctgttcgaggaaaacaacttcaagcccttcaagtacaacgacctgggcgccctggcctacctgggcagcgaaagagccattgccaccatcagaagcggcaagcggaccttctacaccggcggaggcctgatgaccttctacctgtggcggatcctgtacctgagcatgatcctgagcgcccgcagcagactgaaggtgttcttcgactggatcaagctggccttcttcaagagggacttcttcaagggcctgtga

SEQ ID NO: 327 - DNA, 1542 bp, Artificial Sequence
  source: /note="Description of Artificial Sequence: Synthetic polynucleotide"
atgctgagcaagaacctgtacagcaacaagcggctgctgaccagcaccaacaccctcgtgcgcttcgccagcaccagatccaccggcgtcgaaaacagcggggctggccccaccagcttcaagaccatgaaggtcatcgacccccagcacagcgacaagcccaacgtgctgatcctgggctctggctggggcgccatcagctttctgaagcacatcgacaccaagaagtacaacgtcagcatcatcagccccagaagctacttcctgttcacccccctgctgcccagcgcccctgtgggaaccgtggacgagaagtccatcatcgagcccatcgtgaacttcgccctgaagaaaaagggcaacgtcacctactacgaggccgaggccaccagcatcaaccccgaccggaacaccgtgaccatcaagagcctgagcgccgtgtcccagctgtaccagcccgagaaccacctgggcctgcaccaggccgagcccgccgagattaagtacgactacctgatcagcgccgtgggcgccgagcccaacacctttggaatccccggcgtgaccgactacggccacttcctgaaagagatccccaacagcctggaaatccggcggaccttcgccgccaacctggaaaaggccaacctgctgcctaagggcgaccccgagcggagaaggctgctgagcatcgtggtcgtgggcggaggccccacaggcgtggaagctgctggcgagctgcaggactacgtgcaccaggacctgcggaagttcctgcccgccctggccgaggaagtgcagattcacctggtggaagccctgcccatcgtgctgaacatgttcgagaaggagctgagcagctacgcccagagccacctggaaaacacctccatcaaggtgcacctgagaaccgccgtggccaaggtggaagagaagcagctgctggccaagaccaagcacgaggacggcaagattaccgaggaaaccatcccctacggcaccctgatttgggccaccggcaacaaggccagacccgtgatcaccgacctgttcaagaagatccccgagcagaacagcagcaagcggggcctggccgtgaacgacttcctgcaggtcaaaggcagcaacaacatcttcgccatcggcgacaacgcctttagcggcctgcctcctacagcccaggtggcccaccaggaagccgagtacctggccaagaacttcgacaagatggcccagatccccaatttccagaagaacctgtcctcccggaaggataagatcgacctgctgttcgaggaaaacaacttcaagcccttcaagtacaacgacctgggcgccctggcctacctgggcagcgaaagagccattgccaccatcagaagcggcaagcggaccttctacaccggcggaggcctgatgaccttctacctgtggcagatcctgtacctgagcatgatcctgagcgcccgcagcagactgaaggtgttcttcgactggatcaagctggccttcttcaagagggacttcttcaagggcctgtga

SEQ ID NO: 328 - DNA, 1542 bp, Artificial Sequence
  source: /note="Description of Artificial Sequence: Synthetic polynucleotide"
atgctgagcaagaacctgtacagcaacaagcggctgctgaccagcaccaacaccatggtgcgcttcgccagcaccagatccaccggcgtcgaaaacagcggggctggccccaccagcttcaagaccatgaaggtcatcgacccccagcacagcgacaagcccaacgtgctgatcctgggctctggctggggcgccatcagctttctgaagcacatcgacaccaagaagtacaacgtcagcatcatcagccccagaagctacttcctgttcacccccctgctgcccagcgcccctgtgggaaccgtggacgagaagtccatcatcgagcccatcgtgaacttcgccctgaagaaaaagggcaacgtcacctactacgaggccgaggccaccagcatcaaccccgaccggaacaccgtgaccatcaagagcctgagcgccgtgtcccagctgtaccagcccgagaaccacctgggcctgcaccaggccgagcccgccgagattaagtacgactacctgatcagcgccgtgggcgccgagcccaacacctttggaatccccggcgtgaccgactacggccacttcctggaggagatccccaacagcctggaaatccggcggaccttcgccgccaacctggaaaaggccaacctgctgcctaagggcgaccccgagcggagaaggctgctgagcatcgtggtcgtgggcggaggccccacaggcgtggaagctgctggcgagctgcaggactacgtgcaccaggacctgcggaagttcctgcccgccctggccgaggaagtgcagattcacctggtggaagccctgcccatcgtgctgaacatgttcgagaagaagctgagcagctacgcccagagccacctggaaaacacctccatcaaggtgcacctgagaaccgccgtggccaaggtggaagagaagcagctgctggccaagaccaagcacgaggacggcaagattaccgaggaaaccatcccctacggcaccctgatttgggccaccggcaacaaggccagacccgtgatcaccgacctgttcaagaagatccccgagcagaacagcagcaagcggggcctggccgtgaacgacttcctgcaggtcgagggcagcaacaacatcttcgccatcggcgacaacgcctttgccggcctgcctcctacagcccaggtggcccaccaggaagccgagtacctggccaagaacttcgacaagatggcccagatccccaatttccagaagaacctgtcctcccggaaggataagatcgacctgctgttcgaggaaaacaacttcaagcccttcaagtacaacgacctgggcgccctggcctacctgggcagcgaaagagccattgccaccatcagaagcggcaagcggaccttctacaccggcggaggcctgatgaccttctacctgtggcggatcctgtacctgagcatgatcctgagcgcccgcagcagactgaaggtgttcttcgactggatcaagctggccttcttcaagagggacttcttcaagggcctgtga

SEQ ID NO: 329 - DNA, 1542 bp, Artificial Sequence
  source: /note="Description of Artificial Sequence: Synthetic polynucleotide"
atgctgagcaagaacctgtacagcaacaagcggctgctgaccagcaccaacaccatggtgcgcttcgccagcaccagatccaccggcgtcgaaaacagcggggctggccccaccagcttcaagaccatgaaggtcatcgacccccagcacagcgacaagcccaacgtgctgatcctgggctctggctggggcgccatcagctttctgaagcacatcgacaccaagaagtacaacgtcagcatcatcagccccagaagctacttcctgttcacccccctgctgcccagcgcccctgtgggaaccgtggacgagaagtccatcatcgagcccatcgtgaacttcgccctgaagaaaaagggcaacgtcacctactacgaggccgaggccaccagcatcaaccccgaccggaacaccgtgaccatcaagagcctgagcgccgtgtcccagctgtaccagcccgagaaccacctgggcatgcaccaggccgagcccgccgagattaagtacgactacctgatcagcgccgtgggcgccgagcccaacacctttggaatccccggcgtgaccgactacggccacttcctgaaagagatccccaacagcctggaaatccggcggaccttcgccgccaacctggaaaaggccaacctgctgcctaagggcgaccccgagcggagaaggctgctgagcatcgtggtcgtgggcggaggccccacaggcgtggaagctgctggcgagctgcaggactacgtgcaccaggacctgcggaagttcctgcccgccctggccgaggaagtgcagattcacctggtggaagccctgcccatcgtgctgaacatgttcgagaagaagctgagcagctacgcccagagccacctggaaaacacctccatcaaggtgcacctgagaaccgccgtggccaaggtggaagagaagcagctgctggccaagaccaagcacgaggacggcaagattaccgaggaaaccatcccctacggcaccctgatttgggccaccggcaacaaggccagacccgtgatcaccgacctgttcaagaagatccccgagcagaacagcagcaagcggggcctggccgtgaacgacttcctgcaggtcaaaggcagcaacaacatcttcgccatcggcgacaacgcctttgccggcctgcctcctacagcccaggtggcccaccaggaagccgagtacctggccaagaacttcgacaagatggcccagatccccaatttccagaagaacctgtcctcccggaaggataagatcgacctgctgttcgaggaaaacaacttcaagcccttcaagtacaacgacctgggcgccctggcctacctgggcagcgaaagagccattgccaccatcagaagcggcaagcggaccttctacaccggcggaggcctgatgaccttctacctgtggcggatcctgtacctgagcatgatcctgagcgcccgcagcagactgaaggtgttcttcgactggatcaagctggccttcttcaagagggacttcttcgagggcctgtga

SEQ ID NO: 330 - DNA, 1542 bp, Artificial Sequence
  source: /note="Description of Artificial Sequence: Synthetic polynucleotide"
atgctgagcaagaacctgtacagcaacaagcggctgctgaccagcaccaacaccctcgtgcgcttcgccagcaccagatccaccggcgtcgaaaacagcggggctggccccaccagcttcaagaccatgaaggtcatcgacccccagcacagcgacaagcccaacgtgctgatcctgggctctggctggggcgccatcagctttctgaagcacatcgacaccaagaagtacaacgtcagcatcatcagccccagaagctacttcctgttcacccccctgctgcccagcgcccctgtgggaaccgtggacgagaagtccatcatcgagcccatcgtgaacttcgccctgaagaaaaagggcaacgtcacctactacgaggccgaggccaccagcatcaaccccgaccggaacaccgtgaccatcaagagcctgagcgccgtgtcccagctgtaccagcccgagaaccacctgggcctgcaccaggccgagcccgccgagattaagtacgactacctgatcagcgccgtgggcgccgagcccaacacctttggaatccccggcgtgaccgactacggccacttcctgaaagagatccccaacagcctggaaatccggcggaccttcgccgccaacctggaaaaggccaacctgctgcctaagggcgaccccgagcggagaaggctgctgagcatcgtggtcgtgggcggaggccccacaggcgtggaagctgctggcgagctgcaggactacgtgcaccaggacctgcggaagttcctgcccgccctggccgaggaagtgcagattcacctggtggaagccctgcccatcgtgctgaacatgttcgagaagaagctgagcagctacgcccagagccacctggaaaacacctccatcaaggtgcacctgagaaccgccgtggccaaggtggaagagaagcagctgctggccaagaccaagcacgaggacggcaagattaccgaggaaaccatcccctacggcaccctgatttgggccaccggcaacaaggccagacccgtgatcaccgacctgttcaagaagatccccgagcagaacagcagcaagcggggcctggccgtgaacgacttcctgcaggtcgagggcagcaacaacatcttcgccatcggcgacaacgcctttgccggcctgcctcctacagcccaggtggcccaccaggaagccgagtacctggccaagaacttcgacaagatggcccagatccccaatttccagaagaacctgtcctcccggaaggataagatcgacctgctgttcgaggaaaacaacttcaagcccttcaagtacaacgacctgggcgccctggcctacctgggcagcgaaagagccattgccaccatcagaagcggcaagcggaccttctacaccggcggaggcctgatgaccttctacctgtggcagatcctgtacatgagcatgatcctgagcgcccgcagcagactgaaggtgttcttcgactggatcaagctggccttcttcaagagggacttcttcaagggcctgtga

SEQ ID NO: 331 - DNA, 1542 bp, Artificial Sequence
  source: /note="Description of Artificial Sequence: Synthetic polynucleotide"
atgctgagcaagaacctgtacagcaacaagcggctgctgaccagcaccaacaccctcgtgcgcttcgccagcaccagatccaccggcgtcgaaaacagcggggctggccccaccagcttcaagaccatgaaggtcatcgacccccagcacagcgacaagcccaacgtgctgatcctgggctctggctggggcgccatcagctttctgaagcacatcgacaccaagaagtacaacgtcagcatcatcagccccagaaagtacttcctgttcacccccctgctgcccagcgcccctgtgggaaccgtggacgagaagtccatcatcgagcccatcgtgaacttcgccctgaagaaaaagggcaacgtcacctactacgaggccgaggccaccagcatcaaccccgaccggaacaccgtgaccatcaagagcctgagcgccgtgtcccagctgtaccagcccgagaaccacctgggcctgcaccaggccgagcccgccgagattaagtacgactacctgatcagcgccgtgggcgccgagcccaacacctttggaatccccggcgtgaccgactacggccacttcctggaggagatccccaacagcctggaaatccggcggaccttcgccgccaacctggaaaaggccaacctgctgcctaagggcgaccccgagcggagaaggctgctgagcatcgtggtcgtgggcggaggccccacaggcgtggaagctgctggcgagctgcaggactacgtgcaccaggacctgcggaagttcctgcccgccctggccgaggaagtgcagattcacctggtggaagccctgcccatcgtgctgaacatgttcgagaagaagctgagcagctacgcccagagccacctggaaaacacctccatcaaggtgcacctgagaaccgccgtggccaaggtggaagagaagcagctgctggccaagaccaagcacgaggacggcaagattaccgaggaaaccatcccctacggcaccctgatttgggccaccggcaacaaggccagacccgtgatcaccgacctgttcaagaagatccccgagcagaacagcagcaagcggggcctggccgtgaacgacttcctgcaggtcaaaggcagcaacaacatcttcgccatcggcgacaacgcctttgccggcctgcctcctacagcccaggtggcccaccaggaagccgagtacctggccaagaacttcgacaagatggcccagatccccaatttccagaagaacctgtcctcccggaaggataagatcgacctgctgttcgaggaaaacaacttcaagcccttcaagtacaacgacctgggcgccctggcctacctgggcagcgaaagagccattgccaccatcagaagcggcaagcggaccttctacaccggcggaggcctgatgaccttctacctgtggcggatcctgtacctgagcatgatcctgagcgcccgcagcagactgaaggtgttcttcgactggatcaagctggccttcttcaagagggacttcttcgagggcctgtga

SEQ ID NO: 332 - DNA, 1542 bp, Artificial Sequence
  source: /note="Description of Artificial Sequence: Synthetic polynucleotide"
atgctgagcaagaacctgtacagcaacaagcggctgctgaccagcaccaacaccctcgtgcgcttcgccagcaccagatccaccggcgtcgaaaacagcggggctggccccaccagcttcaagaccatgaaggtcatcgacccccagcacagcgacaagcccaacgtgctgatcctgggctctggctggggcgccatcagctttctgaagcacatcgacaccaagaagtacaacgtcagcatcatcagccccagaagctacttcctgttcacccccctgctgcccagcgcccctgtgggaaccgtggacgagaagtccatcatcgagcccatcgtgaacttcgccctgaagaaaaagggcaacgtcacctactacgaggccgaggccaccagcatcaaccccgaccggaacaccgtgaccatcaagagcctgagcgccgtgtcccagctgtaccagcccgagaaccacctgggcctgcaccaggccgagcccgccgagattaagtacgactacctgatcagcgccgtgggcgccgagcccaacacctttggaatccccggcgtgaccgactacggccacttcttcaaagagatccccaacagcctggaaatccggcggaccttcgccgccaacctggaaaaggccaacctgctgcctaagggcgaccccgagcggagaaggctgctgagcatcgtggtcgtgggcggaggccccacaggcgtggaagctgctggcgagctgcaggactacgtgcaccaggacctgcggaagttcctgcccgccctggccgaggaagtgcagattcacctggtggaagccctgcccatcgtgctgaacatgttcgagaaggagctgagcagctacgcccagagccacctggaaaacacctccatcaaggtgcacctgagaaccgccgtggccaaggtggaagagaagcagctgctggccaagaccaagcacgaggacggcaagattaccgaggaaaccatcccctacggcaccctgatttgggccaccggcaacaaggccagacccgtgatcaccgacctgttcaagaagatccccgagcagaacagcagcaagcggggcctggccgtgaacgacttcctgcaggtcaaaggcagcaacaacatcttcgccatcggcgacaacgcctttgccggcctgcctcctacagcccaggtggcccaccaggaagccgagtacctggccaagaacttcgacaagatggcccagatccccaatttccagaagaacctgtcctcccggaaggataagatcgacctgctgttcgaggaaaacaacttcaagcccttcaagtacaacgacctgggcgccctggcctacctgggcagcgaaagagccattgccaccatcagaagcggcaagcggaccttctacaccggcggaggcctgatgaccttctacctgtggcggatcctgtacctgagcatgatcctgagcgcccgcagcagactgaaggtgttcttcgactggatcaagatggccttcttcaagagggacttcttcaagggcctgtga

SEQ ID NO: 333 - DNA, 1542 bp, Artificial Sequence
  source: /note="Description of Artificial Sequence: Synthetic polynucleotide"
atgctgagcaagaacctgtacagcaacaagcggctgctgaccagcaccaacaccctcgtgcgcttcgccagcaccagatccaccggcgtcgaaaacagcggggctggccccaccagcttcaagaccatgaaggtcatcgacccccagcacagcgacaagcccaacgtgctgatcctgggctctggctggggcgccatcagctttctgaagcacatcgacaccaagaagtacaacgtcagcatcatcagccccagaaagtacttcctgttcacccccctgctgcccagcgcccctgtgggaaccgtggacgagaagtccatcatcgagcccatcgtgaacttcgccctgaagaaaaagggcaacgtcacctactacgaggccgaggccaccagcatcaaccccgaccggaacaccgtgaccatcaagagcctgagcgccgtgtcccagctgtaccagcccgagaaccacctgggcctgcaccaggccgagcccgccgagattaagtacgactacctgatcagcgccgtgggcgccgagcccaacacctttggaatccccggcgtgaccgactacggccacttcctgaaagagatccccaacagcctggaaatccggcggaccttcgccgccaacctggaaaaggccaacctgctgcctaagggcgaccccgagcggagaaggctgctgagcatcgtggtcgtgggcggaggccccacaggcgtggaagctgctggcgagctgcaggactacgtgcaccaggacctgcggaagttcttccccgccctggccgaggaagtgcagattcacctggtggaagccctgcccatcgtgctgaacatgttcgagaagaagctgagcagctacgcccagagccacctggaaaacacctccatcaaggtgcacctgagaaccgccgtggccaaggtggaagagaagcagctgctggccaagaccaagcacgaggacggcaagattaccgaggaaaccatcccctacggcaccctgatttgggccaccggcaacaaggccagacccgtgatcaccgacctgttcaagaagatccccgagcagaacagcagcaagcggggcctggccgtgaacgacttcctgcaggtcaaaggcagcaacaacatcttcgccatcggcgacaacgcctttgccggcctgcctcctacagcccaggtggcccaccaggaagccgagtacctggccaagaacttcgacaagatggcccagatccccaatttccagaagaacctgtcctcccggaaggataagatcgacctgctgttcgaggaaaacaacttcaagcccttcaagtacaacgacctgggcgccctggcctacctgggcagcgaaagagccattgccaccatcagaagcggcaagcggaccttctacaccggcggaggcctgatgaccttctacctgtggcggatcctgtacctgagcatgatcctgagcgcccgcagcagactgaaggtgttcttcgactggatcaagctggccttcttcaagagggacttcttcaagggcctgtga

SEQ ID NO: 334 - DNA, 1542 bp, Artificial Sequence
  source: /note="Description of Artificial Sequence: Synthetic polynucleotide"
atgctgagcaagaacctgtacagcaacaagcggctgctgaccagcaccaacaccctcgtgcgcttcgccagcaccagatccaccggcgtcgaaaacagcggggctggccccaccagcttcaagaccatgaaggtcatcgacccccagcacagcgacaagcccaacgtgctgatcctgggctctggctggggcgccatcagctttctgaagcacatcgacaccaagaagtacaacgtcagcatcatcagccccagaagctacttcctgttcacccccctgctgcccagcgcccctgtgggaaccgtggacgagaagtccatcatcgagcccatcgtgaacttcgccctgaagaaaaagggcaacgtcacctactacgaggccgaggccaccagcatcaaccccgaccggaacaccgtgaccatcaagaacctgagcgccgtgtcccagctgtaccagcccgagaaccacctgggcctgcaccaggccgagcccgccgagattaagtacgactacctgatcagcgccgtgggcgccgagcccaacacctttggaatccccggcgtgaccgactacggccacttcctgaaagagatccccaacagcctggaaatccggcggaccttcgccgccaacctggaaaaggccaacctgctgcctaagggcgaccccgagcggagaaggctgctgagcatcgtggtcgtgggcggaggccccacaggcgtggaagctgctggcgagctgcaggactacgtgcaccaggacctgcggaagttcctgcccgccctggccgaggaagtgcagattcacctggtggaagccctgcccatcgtgctgaacatgttcgagaagaagctgagcagctacgcccagagccacctggaaaacacctccatcaaggtgcacctgagaaccgccgtggccaaggtggaagagaagcagctgctggccaagaccaagcacgaggacggcaagattaccgaggaaaccatcccctacggcaccctgatttgggccaccggcaacaaggccagacccgtgatcaccgacctgttcaagaagatccccgagcagaacagcagcaagcggggcctggccgtgaacgacttcctgcaggtcaaaggcagcaacaacatcttcgccatcggcgacaacgcctttgccggcctgcctcctacagcccaggtggcccaccaggaagccgagtacatcgccaagaacttcgacaagatggcccagatccccaatttccagaagaacctgtcctcccggaaggataagatcgacctgctgttcgaggaaaacaacttcaagcccttcaagtacaacgacctgggcgccctggcctacctgggcagcgaaagagccattgccaccatcagaagcggcaagcggaccttctacaccggcggaggcctgatgaccttctacctgtggcggatcctgtacctgagcatgatcctgagcgcccgcagcagactgaaggtgttcttcgactggatcaagctggccttcttcaagagggacttcttcgagggcctgtga

SEQ ID NO: 335 - DNA, 1542 bp, Artificial Sequence
  source: /note="Description of Artificial Sequence: Synthetic polynucleotide"
atgctgagcaagaacctgtacagcaacaagcggctgctgaccagcaccaacaccctcgtgcgcttcgccagcaccagatccaccggcgtcgaaaacagcggggctggccccaccagcttcaagaccatgaaggtcatcgacccccagcacagcgacaagcccaacgtgctgatcctgggctctggctggggcgccatcagctttctgaagcacatcgacaccaagaagtacaacgtcagcatcatcagccccagaagctacttcctgttcacccccctgatgcccagcgcccctgtgggaaccgtggacgagaagtccatcatcgagcccatcgtgaacttcgccctgaagaaaaagggcaacgtcacctactacgaggccgaggccaccagcatcaaccccgaccggaacaccgtgaccatcaagagcctgagcgccgtgtcccagctgtaccagcccgagaaccacctgggcctgcaccaggccgagcccgccgagattaagtacgactacctgatcagcgccgtgggcgccgagcccaacacctttggaatccccggcgtgaccgactacggccacttcttcaaagagatccccaacagcctggaaatccggcggaccttcgccgccaacctggaaaaggccaacctgctgcctaagggcgaccccgagcggagaaggctgctgagcatcgtggtcgtgggcggaggccccacaggcgtggaagctgctggcgagctgcaggactacgtgcaccaggacctgcggaagttcctgcccgccctggccgaggaagtgcagattcacctggtggaagccctgcccatcgtgctgaacatgttcgagaaggagctgagcagctacgcccagagccacctggaaaacacctccatcaaggtgcacctgagaaccgccgtggccaaggtggaagagaagcagctgctggccaagaccaagcacgaggacggcaagattaccgaggaaaccatcccctacggcaccctgatttgggccaccggcaacaaggccagacccgtgatcaccgacctgttcaagaagatccccgagcagaacagcagcaagcggggcctggccgtgaacgacttcctgcaggtcaaaggcagcaacaacatcttcgccatcggcgacaacgcctttgccggcctgcctcctacagcccaggtggcccaccaggaagccgagtacctggccaagaacttcgacaagatggcccagatccccaatttccagaagaacctgtcctcccggaaggataagatcgacctgctgttcgaggaaaacaacttcaagcccttcaagtacaacgacctgggcgccctggcctacctgggcagcgaaagagccattgccaccatcagaagcggcaagcggaccttctacaccggcggaggcctgatgaccttctacctgtggcggatcctgtacctgagcatgatcctgagcgcccgcagcagactgaaggtgttcttcgactggatcaagctggccttcttcaagagggacttcttcaagggcctgtga

SEQ ID NO: 336 - DNA, 1542 bp, Artificial Sequence
  source: /note="Description of Artificial Sequence: Synthetic polynucleotide"
atgctgagcaagaacctgtacagcaacaagcggctgctgaccagcaccaacaccctcgtgcgcttcgccagcaccagatccaccggcgtcgaaaacagcggggctggccccaccagcttcaagaccatgaaggtcatcgacccccagcacagcgacaagcccaacgtgctgatcctgggctctggctggggcgccatcagctttctgaagcacatcgacaccaagaagtacaacgtcagcatcatcagccccagaagctacttcctgttcacccccctgctgcccagcgcccctgtgggaaccgtggacgagaagtccatcatcgagcccatcgtgaacttcgccctgaagaaaaagggcaacgtcacctactacgaggccgaggccaccagcatcaaccccgaccggaacaccgtgaccatcaagagcctgagcgccgtgtcccagctgtaccagcccgagaaccacctgggcctgcaccaggccgagcccgccgagattaagtacgactacctgatcagcgccgtgggcgccgagcccaacacctttggaatccccggcgtgaccgactacggccacttcctggaggagatccccaacagcctggaaatccggcggaccttcgccgccaacctggaaaaggccaacctgctgcctaagggcgaccccgagcggagaaggctgctgagcatcgtggtcgtgggcggaggccccacaggcgtggaagctgctggcgagctgcaggactacgtgcaccaggacctgcggaagttcctgcccgccctggccgaggaagtgcagattcacctggtggaagccctgcccatcgtgctgaacatgttcgagaaggagctgagcagctacgcccagagccacctggaaaacacctccatcaaggtgcacctgagaaccgccgtggccaaggtggaagagaagcagctgctggccaagaccaagcacgaggacggcaagattaccgaggaaaccatcccctacggcaccctgatttgggccaccggcaacaaggccagacccgtgatcaccgacctgttcaagaagatccccgagcagaacagcagcaagcggggcctggccgtgaacgacttcctgcaggtcaaaggcagcaacaacatcttcgccatcggcgacaacgcctttgccggcctgcctcctacagcccaggtggcccaccaggaagccgagtacctggccaagaacttcgacaagatggcccagatccccaatttccagaagaacctgtcctcccggaaggataagatcgacctgctgttcgaggaaaacaacttcaagcccttcaagtacaacgacctgggcgccctggcctacctgggcagcgaaagagccattgccaccatcagaagcggcaagcggaccttctacaccggcggaggcctgatgaccttctacctgtggcggatcctgtacctgagcatgatcctgagcgcccgcagcagactgaaggtgttcttcgactggatcaagatggccttcttcaagagggacttcttcaagggcctgtga

SEQ ID NO: 337 - DNA, 1542 bp, Artificial Sequence
  source: /note="Description of Artificial Sequence: Synthetic polynucleotide"
atgctgagcaagaacctgtacagcaaccggcggctgctgaccagcaccaacaccctcgtgcgcttcgccagcaccagatccaccggcgtcgaaaacagcggggctggccccaccagcttcaagaccatgaaggtcatcgacccccagcacagcgacaagcccaacgtgctgatcctgggctctggctggggcgccatcagctttctgaagcacatcgacaccaagaagtacaacgtcagcatcatcagccccagaagctacttcctgcacacccccctgctgcccagcgcccctgtgggaaccgtggacgagaagtccatcatcgagcccatcgtgaacttcgccctgaagaaaaagggcaacgtcacctactacgaggccgaggccaccagcatcaaccccgaccggaacaccgtgaccatcaagagcctgagcgccgtgtcccagctgtaccagcccgagaaccacctgggcctgcaccaggccgagcccgccgagattaagtacgactacctgatcagcgccgtgggcgccgagcccaacacctttggaatccccggcgtgaccgactacggccacttcctgaaagagatccccaacagcctggaaatccggcggaccttcgccgccaacctggaaaaggccaacctgctgcctaagggcgaccccgagcggagaaggctgctgagcatcgtggtcgtgggcggaggccccacaggcgtggaagctgctggcgagctgcaggactacgtgcaccaggacctgcggaagttcctgcccgccctggccgaggaagtgcagattcacctggtggaagccctgcccatcgtgctgaacatgttcgagaagaagctgagcagctacgcccagagccacctggaaaacacctccatcaaggtgcacctgagaaccgccgtggccaaggtggaagagaagcagctgctggccaagaccaagcacgaggacggcaagattaccgaggaaaccatcccctacggcaccctgatttgggccaccggcaacaaggccagacccgtgatcaccgacctgttcaagaagatccccgagcagaacagcagcaagcggggcctggccgtgaacgacttcctgcaggtcaaaggcagcaacaacatcttcgccatcggcgacaacgcctttgccggcctgcctcctacagcccaggtggcccaccaggaagccgagtacctggccaagaacttcgacaagatggcccagatccccaatttccagaagaacctgtcctcccggaaggataagatcgacctgctgttcgaggaaaacaacttcaagcccttcaagtacaacgacctgggcgccctggcctacctgggcagcgaaagagccattgccaccatcagaagcggcaagcggaccttctacaccggcggaggcctgatgaccttctacctgtggcagatcctgtacctgagcatgatcctgagcgcccgcagcagactgaaggtgttcttcgactggatcaagctggccttcttcaagagggacttcttcaagggcctgtga

SEQ ID NO: 338 - DNA, 1542 bp, Artificial Sequence
  source: /note="Description of Artificial Sequence: Synthetic polynucleotide"
atgctgagcaagaacctgtacagcaacaagcggctgctgaccagcaccaacaccctcgtgcgcttcgccagcaccagatccaccggcgtcgaaaacagcggggctggccccaccagcttcaagaccatgaaggtcatcgacccccagcacagcgacaagcccaacgtgctgatcctgggctctggctggggcgccatcagctttctgaagcacatcgacaccaagaagtacaacgtcagcatcatcagccccagaagctacttcctgcacacccccctgctgcccagcgcccctgtgggaaccgtggacgagaagtccatcatcgagcccatcgtgaacttcgccctgaagaaaaagggcaacgtcacctactacgaggccgaggccaccagcatcaaccccgaccggaacaccgtgaccatcaagagcctgagcgccgtgtcccagctgtaccagcccgagaaccacctgggcctgcaccaggccgagcccgccgagattaagtacgactacctgatcagcgccgtgggcgccgagcccaacacctttggaatccccggcgtgaccgactacggccacttcttcaaagagatccccaacagcctggaaatccggcggaccttcgccgccaacctggaaaaggccaacctgctgcctaagggcgaccccgagcggagaaggctgctgagcatcgtggtcgtgggcggaggccccacaggcgtggaagctgctggcgagctgcaggactacgtgcaccaggacctgcggaagttcctgcccgccctggccgaggaagtgcagattcacctggtggaagccctgcccatcgtgctgaacatgttcgagaagaagctgagcagctacgcccagagccacctggaaaacacctccatcaaggtgcacctgagaaccgccgtggccaaggtggaagagaagcagctgctggccaagaccaagcacgaggacggcaagattaccgaggaaaccatcccctacggcaccctgatttgggccaccggcaacaaggccagacccgtgatcaccgacctgttcaagaagatccccgagcagaacagcagcaagcggggcctggccgtgaacgacttcctgcaggtcaaaggcagcaacaacatcttcgccatcggcgacaacgcctttgccggcctgcctcctacagcccaggtggcccaccaggaagccgagtacatcgccaagaacttcgacaagatggcccagatccccaatttccagaagaacctgtcctcccggaaggataagatcgacctgctgttcgaggaaaacaacttcaagcccttcaagtacaacgacctgggcgccctggcctacctgggcagcgaaagagccattgccaccatcagaagcggcaagcggaccttctacaccggcggaggcctgatgaccttctacctgtggcggatcctgtacctgagcatgatcctgagcgcccgcagcagactgaaggtgttcttcgactggatcaagctggccttcttcaagagggacttcttcaagggcctgtga

SEQ ID NO: 339 - DNA, 1542 bp, Artificial Sequence
  source: /note="Description of Artificial Sequence: Synthetic polynucleotide"
atgctgagcaagaacctgtacagcaacaagcggctgctgaccagcaccaacaccctcgtgcgcttcgccagcaccagatccaccggcgtcgaaaacagcggggctggccccaccagcttcaagaccatgaaggtcatcgacccccagcacagcgacaagcccaacgtgctgatcctgggctctggctggggcgccatcagctttctgaagcacatcgacaccaagaagtacaacgtcagcatcatcagccccagaaagtacttcctgcacacccccctgctgcccagcgcccctgtgggaaccgtggacgagaagtccatcatcgagcccatcgtgaacttcgccctgaagaaaaagggcaacgtcacctactacgaggccgaggccaccagcatcaaccccgaccggaacaccgtgaccatcaagagcctgagcgccgtgtcccagctgtaccagcccgagaaccacctgggcctgcaccaggccgagcccgccgagattaagtacgactacctgatcagcgccgtgggcgccgagcccaacacctttggaatccccggcgtgaccgactacggccacttcctgaaagagatccccaacagcctggaaatccggcggaccttcgccgccaacctggaaaaggccaacctgctgcctaagggcgaccccgagcggagaaggctgctgagcatcgtggtcgtgggcggaggccccacaggcgtggaagctgctggcgagctgcaggactacgtgcaccaggacctgcggaagttcctgcccgccctggccgaggaagtgcagattcacctggtggaagccctgcccatcgtgctgaacatgttcgagaagaagctgagcagctacgcccagagccacctggaaaacacctccatcaaggtgcacctgagaaccgccgtggccaaggtggaagagaagcagctgctggccaagaccaagcacgaggacggcaagattaccgaggaaaccatcccctacggcaccctgatttgggccaccggcaacaaggccagacccgtgatcaccgacctgttcaagaagatccccgagcagaacagcagcaagcggggcctggccgtgaacgacttcctgcaggtcaaaggcagcaacaacatcttcgccatcggcgacaacgcctttgccggcctgcctcctacagcccaggtggcccaccaggaagccgagtacctggccaagaacttcgacaagatggcccagatccccaatttccagaagaacctgtcctcccggaaggataagatcgacctgctgttcgaggaaaacaacttcaagcccttcaagtacaacgacctgggcgccctggcctacctgggcagcgaaagagccattgccaccatcagaagcggcaagcggaccttctacaccggcggaggcctgatgaccttctacctgtggcagatcctgtacctgagcatgatcctgagcgcccgcagcagactgaaggtgttcttcgactggatcaagctggccttcttcaagagggacttcttcaagggcctgtga

SEQ ID NO: 340 - DNA, 1542 bp, Artificial Sequence
  source: /note="Description of Artificial Sequence: Synthetic polynucleotide"
atgctgagcaagaacctgtacagcaacaagcggctgctgaccagcaccaacaccatggtgcgcttcgccagcaccagatccaccggcgtcgaaaacagcggggctggccccaccagcttcaagaccatgaaggtcatcgacccccagcacagcgacaagcccaacgtgctgatcctgggctctggctggggcgccatcagctttctgaagcacatcgacaccaagaagtacaacgtcagcatcatcagccccagaagctacttcctgcacacccccctgctgcccagcgcccctgtgggaaccgtggacgagaagtccatcatcgagcccatcgtgaacttcgccctgaagaaaaagggcaacgtcacctactacgaggccgaggccaccagcatcaaccccgaccggaacaccgtgaccatcaagagcctgagcgccgtgtcccagctgtaccagcccgagaaccacctgggcctgcaccaggccgagcccgccgagattaagtacgactacctgatcagcgccgtgggcgccgagcccaacacctttggaatccccggcgtgaccgactacggccacttcctgaaagagatccccaacagcctggaaatccggcggaccttcgccgccaacctggaaaaggccaacctgctgcctaagggcgaccccgagcggagaaggctgctgagcatcgtggtcgtgggcggaggccccacaggcgtggaagctgctggcgagctgcaggactacgtgcaccaggacctgcggaagttcctgcccgccctggccgaggaagtgcagattcacctggtggaagccctgcccatcgtgctgaacatgttcgagaagaagctgagcagctacgcccagagccacctggaaaacacctccatcaaggtgcacctgagaaccgccgtggccaaggtggaagagaagcagctgctggccaagaccaagcacgaggacggcaagattaccgaggaaaccatcccctacggcaccctgatttgggccaccggcaacaaggccagacccgtgatcaccgacctgttcaagaagatccccgagcagaacagcagcaagcggggcctggccgtgaacgacttcctgcaggtcgagggcagcaacaacatcttcgccatcggcgacaacgcctttgccggcctgcctcctacagcccaggtggcccaccaggaagccgagtacctggccaagaacttcgacaagatggcccagatccccaatttccagaagaacctgtcctcccggaaggataagatcgacctgctgttcgaggaaaacaacttcaagcccttcaagtacaacgacctgggcgccctggcctacctgggcagcgaaagagccattgccaccatcagaagcggcaagcggaccttctacaccggcggaggcctgatgaccttctacctgtggcggatcctgtacctgagcatgatcctgagcgcccgcagcagactgaaggtgttcttcgactggatcaagctggccttcttcaagagggacttcttcaagggcctgtga

SEQ ID NO: 341 - DNA, 1542 bp, Artificial Sequence
  source: /note="Description of Artificial Sequence: Synthetic polynucleotide"
atgctgagcaagaacctgtacagcaacaagcggctgctgaccagcaccaacaccctcgtgcgcttcgccagcaccagatccaccggcgtcgaaaacagcggggctggccccaccagcttcaagaccatgaaggtcatcgacccccagcacagcgacaagcccaacgtgctgatcctgggctctggctggggcgccatcagctttctgaagcacatcgacaccaagaagtacaacgtcagcatcatcagccccagaagctacttcctgttcacccccctgatgcccagcgcccctgtgggaaccgtggacgagaagtccatcatcgagcccatcgtgaacttcgccctgaagaaaaagggcaacgtcacctactacgaggccgaggccaccagcatcaaccccgaccggaacaccgtgaccatcaagagcctgagcgccgtgtcccagctgtaccagcccgagaaccacctgggcctgcaccaggccgagcccgccgagattaagtacgactacctgatcagcgccgtgggcgccgagcccaacacctttggaatccccggcgtgaccgactacggccacttcttcaaagagatccccaacagcctggaaatccggcggaccttcgccgccaacctggaaaaggccaacctgctgcctaagggcgaccccgagcggagaaggctgctgagcatcgtggtcgtgggcggaggccccacaggcgtggaagctgctggcgagctgcaggactacgtgcaccaggacctgcggaagttcctgcccgccctggccgaggaagtgcagattcacctggtggaagccctgcccatcgtgctgaacatgttcgagaagaagctgagcagctacgcccagagccacctggaaaacacctccatcaaggtgcacctgagaaccgccgtggccaaggtggaagagaagcagctgctggccaagaccaagcacgaggacggcaagattaccgaggaaaccatcccctacggcaccctgatttgggccaccggcaacaaggccagacccgtgatcaccgacctgttcaagaagatccccgagcagaacagcagcaagcggggcctggccgtgaacgacttcctgcaggtcaaaggcagcaacaacatcttcgccatcggcgacaacgcctttgccggcctgcctcctacagcccaggtggcccaccaggaagccgagtacctggccaagaacttcgacaagatggcccagatccccaatttccagaagaacctgtcctcccggaaggataagatcgacctgctgttcgaggaaaacaacttcaagcccttcaagtacaacgacctgggcgccctggcctacctgggcagcgaaagagccattgccaccatcagaagcggcaagcggaccttctacaccggcggaggcctgatgaccttctacctgtggcggatcctgtacatgagcatgatcctgagcgcccgcagcagactgaaggtgttcttcgactggatcaagctggccttcttcaagagggacttcttcaagggcctgtga

SEQ ID NO: 342 - DNA, 1542 bp, Artificial Sequence
  source: /note="Description of Artificial Sequence: Synthetic polynucleotide"
atgctatcgaagaatttgtatagtaacaagaggttgctcacctcgacgaatacgctagtcagattcgcttccaccagatccacaggggtggaaaactccggagcaggtcctacatcttttaagaccatgaaagtcattgaccctcagcacagcgacaaaccaaacgtgctgatactgggttcggggtggggagctatttcgtttttaaagcacattgacaccaagaagtacaacgtttccatcatctctcctagaagctatttcttatttacgcctttgttaccttctgcaccagttgggacagtagacgaaaagtcaattattgagcccatcgttaattttgctctcaagaaaaaggggaacgttacctactatgaggcagaagccacctctatcaatcccgacaggaataccgttaccataaaatcattatctgccgttagccagctataccaacctgaaaaccatctagggctgcatcaagcagaacctgctgaaattaagtacgattatttaatcagtgctgtaggtgcggaacctaacacatttggtattcctggggtcactgattacggtcatttcttcaaggaaattcccaactctttggaaataagaagaacttttgccgccaatctagaggaggctaacttattgccaaagggtgatcccgaaagaagaagactactgtccattgtcgtggttggtggtgggcctactggtgtagaggccgctggtgaactacaggattatgttcaccaggacctgagaaagtttttccctgcattggccgaagaagtccaaattcacttggtcgaagctctgcccatcgttttgaatatgtttgagaaagagctttcatcatacgcgcaatcacatttagaaaacacttcgatcaaagtacatctgagaacggctgtcgccaaagttgaagaaaagcaattgttggcaaagaccaaacacgaagacggtaaaataaccgaagaaactattccatacggtactttgatttgggccacgggtaacaaggcaagaccggtaatcactgaccttttcaagaaaattcctgagcaaaactcgtccaagagaggattggcagtgaatgactttttgcaggtgaaaggcagcaacaacattttcgccattggtgacaatgcatttgctgggttgccaccaaccgcccaagtagcgcaccaagaggccgaatatttggccaagaattttgataaaatggctcaaataccaaatttccaaaagaatctatcttcaagaaaggataaaattgatctcttgttcgaggagaacaactttaaacctttcaaatacaacgatttaggtgccttagcatacctgggatccgaaagggccattgcaaccatacgttccggtaagagaacattttacaccggtggtggcttaatgaccttctacttatggagaattttgtacttgtccatgattctatctgcaagatcgagattaaaggtctttttcgactggattaaattagcatttttcaaaagagacttttttgagggattatag

SEQ ID NO: 343 - DNA, 1542 bp, Artificial Sequence
  source: /note="Description of Artificial Sequence: Synthetic polynucleotide"
atgctatcgaagaatttgtatagtaacaagaggttgctcacctcgacgaatacgctagtcagattcgcttccaccagatccacaggggtggaaaactccggagcaggtcctacatcttttaagaccatgaaagtcattgaccctcagcacagcgacaaaccaaacgtgctgatactgggttcggggtggggagctatttcgtttttaaagcacattgacaccaagaagtacaacgtttccatcatctctcctagaagctatttcttacacacgcctttgttaccttctgcaccagttgggacagtagacgaaaagtcaattattgagcccatcgttaattttgctctcaagaaaaaggggaacgttacctactatgaggcagaagccacctctatcaatcccgacaggaataccgttaccataaaaaacttatctgccgttagccagctataccaacctgaaaaccatctagggctgcatcaagcagaacctgctgaaattaagtacgattatttaatcagtgctgtaggtgcggaacctaacacatttggtattcctggggtcactgattacggtcatttcctgaaggaaattcccaactctttggaaataagaagaacttttgccgccaatctagagaaggctaacttattgccaaagggtgatcccgaaagaagaagactactgtccattgtcgtggttggtggtgggcctactggtgtagaggccgctggtgaactacaggattatgttcaccaggacctgagaaagtttttccctgcattggccgaagaagtccaaattcacttggtcgaagctctgcccatcgttttgaatatgtttgagaaaaagctttcatcatacgcgcaatcacatttagaaaacacttcgatcaaagtacatctgagaacggctgtcgccaaagttgaagaaaagcaattgttggcaaagaccaaacacgaagacggtaaaataaccgaagaaactattccatacggtactttgatttgggccacgggtaacaaggcaagaccggtaatcactgaccttttcaagaaaattcctgagcaaaactcgtccaagagaggattggcagtgaatgactttttgcaggtgaaaggcagcaacaacattttcgccattggtgacaatgcatttgctgggttgccaccaaccgcccaagtagcgcaccaagaggccgaatatttggccaagaattttgataaaatggctcaaataccaaatttccaaaagaatctatcttcaagaaaggataaaattgatctcttgttcgaggagaacaactttaaacctttcaaatacaacgatttaggtgccttagcatacctgggatccgaaagggccattgcaaccatacgttccggtaagagaacattttacaccggtggtggcttaatgaccttctacttatggcagattttgtacttgtccatgattctatctgcaagatcgagattaaaggtctttttcgactggattaaattagcatttttcaaaagagacttttttgagggattatag

SEQ ID NO: 344 - DNA, 1542 bp, Artificial Sequence
  source: /note="Description of Artificial Sequence: Synthetic polynucleotide"
atgctatcgaagaatttgtatagtaacaagaggttgctcacctcgacgaatacgatggtcagattcgcttccaccagatccacaggggtggaaaactccggagcaggtcctacatcttttaagaccatgaaagtcattgaccctcagcacagcgacaaaccaaacgtgctgatactgggttcggggtggggagctatttcgtttttaaagcacattgacaccaagaagtacaacgtttccatcatctctcctagaagctatttcttatttacgcctttgttaccttctgcaccagttgggacagtagacgaaaagtcaattattgagcccatcgttaattttgctctcaagaaaaaggggaacgttacctactatgaggcagaagccacctctatcaatcccgacaggaataccgttaccataaaatcattatctgccgttagccagctataccaacctgaaaaccatctagggctgcatcaagcagaacctgctgaaattaagtacgattatttaatcagtgctgtaggtgcggaacctaacacatttggtattcctggggtcactgattacggtcatttcttcaaggaaattcccaactctttggaaataagaagaacttttgccgccaatctagagaaggctaacttattgccaaagggtgatcccgaaagaagaagactactgtccattgtcgtggttggtggtgggcctactggtgtagaggccgctggtgaactacaggattatgttcaccaggacctgagaaagtttctccctgcattggccgaagaagtccaaattcacttggtcgaagctctgcccatcgttttgaatatgtttgagaaagagctttcatcatacgcgcaatcacatttagaaaacacttcgatcaaagtacatctgagaacggctgtcgccaaagttgaagaaaagcaattgttggcaaagaccaaacacgaagacggtaaaataaccgaagaaactattccatacggtactttgatttgggccacgggtaacaaggcaagaccggtaatcactgaccttttcaagaaaattcctgagcaaaactcgtccaagagaggattggcagtgaatgactttttgcaggtgaaaggcagcaacaacattttcgccattggtgacaatgcatttagcgggttgccaccaaccgcccaagtagcgcaccaagaggccgaatatttggccaagaattttgataaaatggctcaaataccaaatttccaaaagaatctatcttcaagaaaggataaaattgatctcttgttcgaggagaacaactttaaacctttcaaatacaacgatttaggtgccttagcatacctgggatccgaaagggccattgcaaccatacgttccggtaagagaacattttacaccggtggtggcttaatgaccttctacttatggagaattttgtacatgtccatgattctatctgcaagatcgagattaaaggtctttttcgactggattaaattagcatttttcaaaagagacttttttaaaggattatag

SEQ ID NO: 345 - DNA, 1542 bp, Artificial Sequence
  source: /note="Description of Artificial Sequence: Synthetic polynucleotide"
atgctatcgaagaatttgtatagtaaccggaggttgctcacctcgacgaatacgctagtcagattcgcttccaccagatccacaggggtggaaaactccggagcaggtcctacatcttttaagaccatgaaagtcattgaccctcagcacagcgacaaaccaaacgtgctgatactgggttcggggtggggagctatttcgtttttaaagcacattgacaccaagaagtacaacgtttccatcatctctcctagaagctatttcttatttacgcctttgatgccttctgcaccagttgggacagtagacgaaaagtcaattattgagcccatcgttaattttgctctcaagaaaaaggggaacgttacctactatgaggcagaagccacctctatcaatcccgacaggaataccgttaccataaaatcattatctgccgttagccagctataccaacctgaaaaccatctagggatgcatcaagcagaacctgctgaaattaagtacgattatttaatcagtgctgtaggtgcggaacctaacacatttggtattcctggggtcactgattacggtcatttcctgaaggaaattcccaactctttggaaataagaagaacttttgccgccaatctagagaaggctaacttattgccaaagggtgatcccgaaagaagaagactactgtccattgtcgtggttggtggtgggcctactggtgtagaggccgctggtgaactacaggattatgttcaccaggacctgagaaagtttttccctgcattggccgaagaagtccaaattcacttggtcgaagctctgcccatcgttttgaatatgtttgagaaaaagctttcatcatacgcgcaatcacatttagaaaacacttcgatcaaagtacatctgagaacggctgtcgccaaagttgaagaaaagcaattgttggcaaagaccaaacacgaagacggtaaaataaccgaagaaactattccatacggtactttgatttgggccacgggtaacaaggcaagaccggtaatcactgaccttttcaagaaaattcctgagcaaaactcgtccaagagaggattggcagtgaatgactttttgcaggtgaaaggcagcaacaacattttcgccattggtgacaatgcatttgctgggttgccaccaaccgcccaagtagcgcaccaagaggccgaatatttggccaagaattttgataaaatggctcaaataccaaatttccaaaagaatctatcttcaagaaaggataaaattgatctcttgttcgaggagaacaactttaaacctttcaaatacaacgatttaggtgccttagcatacctgggatccgaaagggccattgcaaccatacgttccggtaagagaacattttacaccggtggtggcttaatgaccttctacttatggagaattttgtacttgtccatgattctatctgcaagatcgagattaaaggtctttttcgactggattaaaatggcatttttcaaaagagacttttttaaaggattatag

SEQ ID NO: 346 - DNA, 1542 bp, Artificial Sequence
  source: /note="Description of Artificial Sequence: Synthetic polynucleotide"
atgctatcgaagaatttgtatagtaacaagaggttgctcacctcgacgaatacgatggtcagattcgcttccaccagatccacaggggtggaaaactccggagcaggtcctacatcttttaagaccatgaaagtcattgaccctcagcacagcgacaaaccaaacgtgctgatactgggttcggggtggggagctatttcgtttttaaagcacattgacaccaagaagtacaacgtttccatcatctctcctagaagctatttcttacacacgcctttgttaccttctgcaccagttgggacagtagacgaaaagtcaattattgagcccatcgttaattttgctctcaagaaaaaggggaacgttacctactatgaggcagaagccacctctatcaatcccgacaggaataccgttaccataaaatcattatctgccgttagccagctataccaacctgaaaaccatctagggctgcatcaagcagaacctgctgaaattaagtacgattatttaatcagtgctgtaggtgcggaacctaacacatttggtattcctggggtcactgattacggtcatttcttcaaggaaattcccaactctttggaaataagaagaacttttgccgccaatctagaggaggctaacttattgccaaagggtgatcccgaaagaagaagactactgtccattgtcgtggttggtggtgggcctactggtgtagaggccgctggtgaactacaggattatgttcaccaggacctgagaaagtttctccctgcattggccgaagaagtccaaattcacttggtcgaagctctgcccatcgttttgaatatgtttgagaaaaagctttcatcatacgcgcaatcacatttagaaaacacttcgatcaaagtacatctgagaacggctgtcgccaaagttgaagaaaagcaattgttggcaaagaccaaacacgaagacggtaaaataaccgaagaaactattccatacggtactttgatttgggccacgggtaacaaggcaagaccggtaatcactgaccttttcaagaaaattcctgagcaaaactcgtccaagagaggattggcagtgaatgactttttgcaggtgaaaggcagcaacaacattttcgccattggtgacaatgcatttgctgggttgccaccaaccgcccaagtagcgcaccaagaggccgaatatatcgccaagaattttgataaaatggctcaaataccaaatttccaaaagaatctatcttcaagaaaggataaaattgatctcttgttcgaggagaacaactttaaacctttcaaatacaacgatttaggtgccttagcatacctgggatccgaaagggccattgcaaccatacgttccggtaagagaacattttacaccggtggtggcttaatgaccttctacttatggagaattttgtacttgtccatgattctatctgcaagatcgagattaaaggtctttttcgactggattaaattagcatttttcaaaagagacttttttaaaggattatag

SEQ ID NO: 347 - DNA, 1542 bp, Artificial Sequence
  source: /note="Description of Artificial Sequence: Synthetic polynucleotide"
atgctatcgaagaatttgtatagtaacaagaggttgctcacctcgacgaatacgatggtcagattcgcttccaccagatccacaggggtggaaaactccggagcaggtcctacatcttttaagaccatgaaagtcattgaccctcagcacagcgacaaaccaaacgtgctgatactgggttcggggtggggagctatttcgtttttaaagcacattgacaccaagaagtacaacgtttccatcatctctcctagaagctatttcttatttacgcctttgatgccttctgcaccagttgggacagtagacgaaaagtcaattattgagcccatcgttaattttgctctcaagaaaaaggggaacgttacctactatgaggcagaagccacctctatcaatcccgacaggaataccgttaccataaaatcattatctgccgttagccagctataccaacctgaaaaccatctagggatgcatcaagcagaacctgctgaaattaagtacgattatttaatcagtgctgtaggtgcggaacctaacacatttggtattcctggggtcactgattacggtcatttcctgaaggaaattcccaactctttggaaataagaagaacttttgccgccaatctagaggaggctaacttattgccaaagggtgatcccgaaagaagaagactactgtccattgtcgtggttggtggtgggcctactggtgtagaggccgctggtgaactacaggattatgttcaccaggacctgagaaagtttctccctgcattggccgaagaagtccaaattcacttggtcgaagctctgcccatcgttttgaatatgtttgagaaaaagctttcatcatacgcgcaatcacatttagaaaacacttcgatcaaagtacatctgagaacggctgtcgccaaagttgaagaaaagcaattgttggcaaagaccaaacacgaagacggtaaaataaccgaagaaactattccatacggtactttgatttgggccacgggtaacaaggcaagaccggtaatcactgaccttttcaagaaaattcctgagcaaaactcgtccaagagaggattggcagtgaatgactttttgcaggtggagggcagcaacaacattttcgccattggtgacaatgcatttgctgggttgccaccaaccgcccaagtagcgcaccaagaggccgaatatttggccaagaattttgataaaatggctcaaataccaaatttccaaaagaatctatcttcaagaaaggataaaattgatctcttgttcgaggagaacaactttaaacctttcaaatacaacgatttaggtgccttagcatacctgggatccgaaagggccattgcaaccatacgttccggtaagagaacattttacaccggtggtggcttaatgaccttctacttatggagaattttgtacttgtccatgattctatctgcaagatcgagattaaaggtctttttcgactggattaaattagcatttttcaaaagagacttttttaaaggattatag

SEQ ID NO: 348 - DNA, 1542 bp, Artificial Sequence
  source: /note="Description of Artificial Sequence: Synthetic polynucleotide"
atgctatcgaagaatttgtatagtaaccggaggttgctcacctcgacgaatacgctagtcagattcgcttccaccagatccacaggggtggaaaactccggagcaggtcctacatcttttaagaccatgaaagtcattgaccctcagcacagcgacaaaccaaacgtgctgatactgggttcggggtggggagctatttcgtttttaaagcacattgacaccaagaagtacaacgtttccatcatctctcctagaagctatttcttatttacgcctttgttaccttctgcaccagttgggacagtagacgaaaagtcaattattgagcccatcgttaattttgctctcaagaaaaaggggaacgttacctactatgaggcagaagccacctctatcaatcccgacaggaataccgttaccataaaatcattatctgccgttagccagctataccaacctgaaaaccatctagggctgcatcaagcagaacctgctgaaattaagtacgattatttaatcagtgctgtaggtgcggaacctaacacatttggtattcctggggtcactgattacggtcatttcctgaaggaaattcccaactctttggaaataagaagaacttttgccgccaatctagaggaggctaacttattgccaaagggtgatcccgaaagaagaagactactgtccattgtcgtggttggtggtgggcctactggtgtagaggccgctggtgaactacaggattatgttcaccaggacctgagaaagtttctccctgcattggccgaagaagtccaaattcacttggtcgaagctctgcccatcgttttgaatatgtttgagaaaaagctttcatcatacgcgcaatcacatttagaaaacacttcgatcaaagtacatctgagaacggctgtcgccaaagttgaagaaaagcaattgttggcaaagaccaaacacgaagacggtaaaataaccgaagaaactattccatacggtactttgatttgggccacgggtaacaaggcaagaccggtaatcactgaccttttcaagaaaattcctgagcaaaactcgtccaagagaggattggcagtgaatgactttttgcaggtggagggcagcaacaacattttcgccattggtgacaatgcatttgctgggttgccaccaaccgcccaagtagcgcaccaagaggccgaatatttggccaagaattttgataaaatggctcaaataccaaatttccaaaagaatctatcttcaagaaaggataaaattgatctcttgttcgaggagaacaactttaaacctttcaaatacaacgatttaggtgccttagcatacctgggatccgaaagggccattgcaaccatacgttccggtaagagaacattttacaccggtggtggcttaatgaccttctacttatggagaattttgtacatgtccatgattctatctgcaagatcgagattaaaggtctttttcgactggattaaaatggcatttttcaaaagagacttttttaaaggattatag

SEQ ID NO: 349 - DNA, 1542 bp, Artificial Sequence
  source: /note="Description of Artificial Sequence: Synthetic polynucleotide"
atgctatcgaagaatttgtatagtaacaagaggttgctcacctcgacgaatacgctagtcagattcgcttccaccagatccacaggggtggaaaactccggagcaggtcctacatcttttaagaccatgaaagtcattgaccctcagcacagcgacaaaccaaacgtgctgatactgggttcggggtggggagctatttcgtttttaaagcacattgacaccaagaagtacaacgtttccatcatctctcctagaagctatttcttatttacgcctttgatgccttctgcaccagttgggacagtagacgaaaagtcaattattgagcccatcgttaattttgctctcaagaaaaaggggaacgttacctactatgaggcagaagccacctctatcaatcccgacaggaataccgttaccataaaaaacttatctgccgttagccagctataccaacctgaaaaccatctagggctgcatcaagcagaacctgctgaaattaagtacgattatttaatcagtgctgtaggtgcggaacctaacacatttggtattcctggggtcactgattacggtcatttcctggaggaaattcccaactctttggaaataagaagaacttttgccgccaatctagaggaggctaacttattgccaaagggtgatcccgaaagaagaagactactgtccattgtcgtggttggtggtgggcctactggtgtagaggccgctggtgaactacaggattatgttcaccaggacctgagaaagtttctccctgcattggccgaagaagtccaaattcacttggtcgaagctctgcccatcgttttgaatatgtttgagaaaaagctttcatcatacgcgcaatcacatttagaaaacacttcgatcaaagtacatctgagaacggctgtcgccaaagttgaagaaaagcaattgttggcaaagaccaaacacgaagacggtaaaataaccgaagaaactattccatacggtactttgatttgggccacgggtaacaaggcaagaccggtaatcactgaccttttcaagaaaattcctgagcaaaactcgtccaagagaggattggcagtgaatgactttttgcaggtgaaaggcagcaacaacattttcgccattggtgacaatgcatttgctgggttgccaccaaccgcccaagtagcgcaccaagaggccgaatatttggccaagaattttgataaaatggctcaaataccaaatttccaaaagaatctatcttcaagaaaggataaaattgatctcttgttcgaggagaacaactttaaacctttcaaatacaacgatttaggtgccttagcatacctgggatccgaaagggccattgcaaccatacgttccggtaagagaacattttacaccggtggtggcttaatgaccttctacttatggagaattttgtacttgtccatgattctatctgcaagatcgagattaaaggtctttttcgactggattaaattagcatttttcaaaagagacttttttgagggattatag

SEQ ID NO: 350 - DNA, 1542 bp, Artificial Sequence
  source: /note="Description of Artificial Sequence: Synthetic polynucleotide"
atgctatcgaagaatttgtatagtaaccggaggttgctcacctcgacgaatacgctagtcagattcgcttccaccagatccacaggggtggaaaactccggagcaggtcctacatcttttaagaccatgaaagtcattgaccctcagcacagcgacaaaccaaacgtgctgatactgggttcggggtggggagctatttcgtttttaaagcacattgacaccaagaagtacaacgtttccatcatctctcctagaagctatttcttacacacgcctttgttaccttctgcaccagttgggacagtagacgaaaagtcaattattgagcccatcgttaattttgctctcaagaaaaaggggaacgttacctactatgaggcagaagccacctctatcaatcccgacaggaataccgttaccataaaatcattatctgccgttagccagctataccaacctgaaaaccatctagggctgcatcaagcagaacctgctgaaattaagtacgattatttaatcagtgctgtaggtgcggaacctaacacatttggtattcctggggtcactgattacggtcatttcctgaaggaaattcccaactctttggaaataagaagaacttttgccgccaatctagagaaggctaacttattgccaaagggtgatcccgaaagaagaagactactgtccattgtcgtggttggtggtgggcctactggtgtagaggccgctggtgaactacaggattatgttcaccaggacctgagaaagtttttccctgcattggccgaagaagtccaaattcacttggtcgaagctctgcccatcgttttgaatatgtttgagaaaaagctttcatcatacgcgcaatcacatttagaaaacacttcgatcaaagtacatctgagaacggctgtcgccaaagttgaagaaaagcaattgttggcaaagaccaaacacgaagacggtaaaataaccgaagaaactattccatacggtactttgatttgggccacgggtaacaaggcaagaccggtaatcactgaccttttcaagaaaattcctgagcaaaactcgtccaagagaggattggcagtgaatgactttttgcaggtgaaaggcagcaacaacattttcgccattggtgacaatgcatttgctgggttgccaccaaccgcccaagtagcgcaccaagaggccgaatatttggccaagaattttgataaaatggctcaaataccaaatttccaaaagaatctatcttcaagaaaggataaaattgatctcttgttcgaggagaacaactttaaacctttcaaatacaacgatttaggtgccttagcatacctgggatccgaaagggccattgcaaccatacgttccggtaagagaacattttacaccggtggtggcttaatgaccttctacttatggagaattttgtacttgtccatgattctatctgcaagatcgagattaaaggtctttttcgactggattaaaatggcatttttcaaaagagacttttttgagggattatag

SEQ ID NO: 351 - DNA, 1542 bp, Artificial Sequence
  source: /note="Description of Artificial Sequence: Synthetic polynucleotide"
atgctatcgaagaatttgtatagtaacaagaggttgctcacctcgacgaatacgctagtcagattcgcttccaccagatccacaggggtggaaaactccggagcaggtcctacatcttttaagaccatgaaagtcattgaccctcagcacagcgacaaaccaaacgtgctgatactgggttcggggtggggagctatttcgtttttaaagcacattgacaccaagaagtacaacgtttccatcatctctcctagaagctatttcttacacacgcctttgttaccttctgcaccagttgggacagtagacgaaaagtcaattattgagcccatcgttaattttgctctcaagaaaaaggggaacgttacctactatgaggcagaagccacctctatcaatcccgacaggaataccgttaccataaaatcattatctgccgttagccagctataccaacctgaaaaccatctagggctgcatcaagcagaacctgctgaaattaagtacgattatttaatcagtgctgtaggtgcggaacctaacacatttggtattcctggggtcactgattacggtcatttcctggaggaaattcccaactctttggaaataagaagaacttttgccgccaatctagagaaggctaacttattgccaaagggtgatcccgaaagaagaagactactgtccattgtcgtggttggtggtgggcctactggtgtagaggccgctggtgaactacaggattatgttcaccaggacctgagaaagtttttccctgcattggccgaagaagtccaaattcacttggtcgaagctctgcccatcgttttgaatatgtttgagaaaaagctttcatcatacgcgcaatcacatttagaaaacacttcgatcaaagtacatctgagaacggctgtcgccaaagttgaagaaaagcaattgttggcaaagaccaaacacgaagacggtaaaataaccgaagaaactattccatacggtactttgatttgggccacgggtaacaaggcaagaccggtaatcactgaccttttcaagaaaattcctgagcaaaactcgtccaagagaggattggcagtgaatgactttttgcaggtgaaaggcagcaacaacattttcgccattggtgacaatgcatttagcgggttgccaccaaccgcccaagtagcgcaccaagaggccgaatatttggccaagaattttgataaaatggctcaaataccaaatttccaaaagaatctatcttcaagaaaggataaaattgatctcttgttcgaggagaacaactttaaacctttcaaatacaacgatttaggtgccttagcatacctgggatccgaaagggccattgcaaccatacgttccggtaagagaacattttacaccggtggtggcttaatgaccttctacttatggagaattttgtacttgtccatgattctatctgcaagatcgagattaaaggtctttttcgactggattaaaatggcatttttcaaaagagacttttttaaaggattatag

SEQ ID NO: 352 - DNA, 1542 bp, Artificial Sequence
  source: /note="Description of Artificial Sequence: Synthetic polynucleotide"
atgctatcgaagaatttgtatagtaacaagaggttgctcacctcgacgaatacgctagtcagattcgcttccaccagatccacaggggtggaaaactccggagcaggtcctacatcttttaagaccatgaaagtcattgaccctcagcacagcgacaaaccaaacgtgctgatactgggttcggggtggggagctatttcgtttttaaagcacattgacaccaagaagtacaacgtttccatcatctctcctagaaagtatttcttatttacgcctttgttaccttctgcaccagttgggacagtagacgaaaagtcaattattgagcccatcgttaattttgctctcaagaaaaaggggaacgttacctactatgaggcagaagccacctctatcaatcccgacaggaataccgttaccataaaatcattatctgccgttagccagctataccaacctgaaaaccatctagggatgcatcaagcagaacctgctgaaattaagtacgattatttaatcagtgctgtaggtgcggaacctaacacatttggtattcctggggtcactgattacggtcatttcttcaaggaaattcccaactctttggaaataagaagaacttttgccgccaatctagaggaggctaacttattgccaaagggtgatcccgaaagaagaagactactgtccattgtcgtggttggtggtgggcctactggtgtagaggccgctggtgaactacaggattatgttcaccaggacctgagaaagtttctccctgcattggccgaagaagtccaaattcacttggtcgaagctctgcccatcgttttgaatatgtttgagaaaaagctttcatcatacgcgcaatcacatttagaaaacacttcgatcaaagtacatctgagaacggctgtcgccaaagttgaagaaaagcaattgttggcaaagaccaaacacgaagacggtaaaataaccgaagaaactattccatacggtactttgatttgggccacgggtaacaaggcaagaccggtaatcactgaccttttcaagaaaattcctgagcaaaactcgtccaagagaggattggcagtgaatgactttttgcaggtgaaaggcagcaacaacattttcgccattggtgacaatgcatttgctgggttgccaccaaccgcccaagtagcgcaccaagaggccgaatatttggccaagaattttgataaaatggctcaaataccaaatttccaaaagaatctatcttcaagaaaggataaaattgatctcttgttcgaggagaacaactttaaacctttcaaatacaacgatttaggtgccttagcatacctgggatccgaaagggccattgcaaccatacgttccggtaagagaacattttacaccggtggtggcttaatgaccttctacttatggagaattttgtacatgtccatgattctatctgcaagatcgagattaaaggtctttttcgactggattaaattagcatttttcaaaagagacttttttaaaggattatag

SEQ ID NO: 353 - DNA, 1542 bp, Artificial Sequence
  source: /note="Description of Artificial Sequence: Synthetic polynucleotide"
atgctatcgaagaatttgtatagtaacaagaggttgctcacctcgacgaatacgctagtcagattcgcttccaccagatccacaggggtggaaaactccggagcaggtcctacatcttttaagaccatgaaagtcattgaccctcagcacagcgacaaaccaaacgtgctgatactgggttcggggtggggagctatttcgtttttaaagcacattgacaccaagaagtacaacgtttccatcatctctcctagaagctatttcttatttacgcctttgttaccttctgcaccagttgggacagtagacgaaaagtcaattattgagcccatcgttaattttgctctcaagaaaaaggggaacgttacctactatgaggcagaagccacctctatcaatcccgacaggaataccgttaccataaaatcattatctgccgttagccagctataccaacctgaaaaccatctagggatgcatcaagcagaacctgctgaaattaagtacgattatttaatcagtgctgtaggtgcggaacctaacacatttggtattcctggggtcactgattacggtcatttcttcaaggaaattcccaactctttggaaataagaagaacttttgccgccaatctagagaaggctaacttattgccaaagggtgatcccgaaagaagaagactactgtccattgtcgtggttggtggtgggcctactggtgtagaggccgctggtgaactacaggattatgttcaccaggacctgagaaagtttctccctgcattggccgaagaagtccaaattcacttggtcgaagctctgcccatcgttttgaatatgtttgagaaaaagctttcatcatacgcgcaatcacatttagaaaacacttcgatcaaagtacatctgagaacggctgtcgccaaagttgaagaaaagcaattgttggcaaagaccaaacacgaagacggtaaaataaccgaagaaactattccatacggtactttgatttgggccacgggtaacaaggcaagaccggtaatcactgaccttttcaagaaaattcctgagcaaaactcgtccaagagaggattggcagtgaatgactttttgcaggtggagggcagcaacaacattttcgccattggtgacaatgcatttgctgggttgccaccaaccgcccaagtagcgcaccaagaggccgaatatatcgccaagaattttgataaaatggctcaaataccaaatttccaaaagaatctatcttcaagaaaggataaaattgatctcttgttcgaggagaacaactttaaacctttcaaatacaacgatttaggtgccttagcatacctgggatccgaaagggccattgcaaccatacgttccggtaagagaacattttacaccggtggtggcttaatgaccttctacttatggcagattttgtacttgtccatgattctatctgcaagatcgagattaaaggtctttttcgactggattaaattagcatttttcaaaagagacttttttaaaggattatag

SEQ ID NO: 354 - DNA, 1542 bp, Artificial Sequence
  source: /note="Description of Artificial Sequence: Synthetic polynucleotide"
atgctatcgaagaatttgtatagtaacaagaggttgctcacctcgacgaatacgctagtcagattcgcttccaccagatccacaggggtggaaaactccggagcaggtcctacatcttttaagaccatgaaagtcattgaccctcagcacagcgacaaaccaaacgtgctgatactgggttcggggtggggagctatttcgtttttaaagcacattgacaccaagaagtacaacgtttccatcatctctcctagaaagtatttcttacacacgcctttgttaccttctgcaccagttgggacagtagacgaaaagtcaattattgagcccatcgttaattttgctctcaagaaaaaggggaacgttacctactatgaggcagaagccacctctatcaatcccgacaggaataccgttaccataaaatcattatctgccgttagccagctataccaacctgaaaaccatctagggctgcatcaagcagaacctgctgaaattaagtacgattatttaatcagtgctgtaggtgcggaacctaacacatttggtattcctggggtcactgattacggtcatttcctggaggaaattcccaactctttggaaataagaagaacttttgccgccaatctagaggaggctaacttattgccaaagggtgatcccgaaagaagaagactactgtccattgtcgtggttggtggtgggcctactggtgtagaggccgctggtgaactacaggattatgttcaccaggacctgagaaagtttctccctgcattggccgaagaagtccaaattcacttggtcgaagctctgcccatcgttttgaatatgtttgagaaaaagctttcatcatacgcgcaatcacatttagaaaacacttcgatcaaagtacatctgagaacggctgtcgccaaagttgaagaaaagcaattgttggcaaagaccaaacacgaagacggtaaaataaccgaagaaactattccatacggtactttgatttgggccacgggtaacaaggcaagaccggtaatcactgaccttttcaagaaaattcctgagcaaaactcgtccaagagaggattggcagtgaatgactttttgcaggtgaaaggcagcaacaacattttcgccattggtgacaatgcatttgctgggttgccaccaaccgcccaagtagcgcaccaagaggccgaatatttggccaagaattttgataaaatggctcaaataccaaatttccaaaagaatctatcttcaagaaaggataaaattgatctcttgttcgaggagaacaactttaaacctttcaaatacaacgatttaggtgccttagcatacctgggatccgaaagggccattgcaaccatacgttccggtaagagaacattttacaccggtggtggcttaatgaccttctacttatggagaattttgtacatgtccatgattctatctgcaagatcgagattaaaggtctttttcgactggattaaattagcatttttcaaaagagacttttttaaaggattatag

SEQ ID NO: 355 - DNA, 1542 bp, Artificial Sequence
  source: /note="Description of Artificial Sequence: Synthetic polynucleotide"
atgctatcgaagaatttgtatagtaacaagaggttgctcacctcgacgaatacgatggtcagattcgcttccaccagatccacaggggtggaaaactccggagcaggtcctacatcttttaagaccatgaaagtcattgaccctcagcacagcgacaaaccaaacgtgctgatactgggttcggggtggggagctatttcgtttttaaagcacattgacaccaagaagtacaacgtttccatcatctctcctagaaagtatttcttatttacgcctttgttaccttctgcaccagttgggacagtagacgaaaagtcaattattgagcccatcgttaattttgctctcaagaaaaaggggaacgttacctactatgaggcagaagccacctctatcaatcccgacaggaataccgttaccataaaaaacttatctgccgttagccagctataccaacctgaaaaccatctagggctgcatcaagcagaacctgctgaaattaagtacgattatttaatcagtgctgtaggtgcggaacctaacacatttggtattcctggggtcactgattacggtcatttcctgaaggaaattcccaactctttggaaataagaagaacttttgccgccaatctagagaaggctaacttattgccaaagggtgatcccgaaagaagaagactactgtccattgtcgtggttggtggtgggcctactggtgtagaggccgctggtgaactacaggattatgttcaccaggacctgagaaagtttctccctgcattggccgaagaagtccaaattcacttggtcgaagctctgcccatcgttttgaatatgtttgagaaaaagctttcatcatacgcgcaatcacatttagaaaacacttcgatcaaagtacatctgagaacggctgtcgccaaagttgaagaaaagcaattgttggcaaagaccaaacacgaagacggtaaaataaccgaagaaactattccatacggtactttgatttgggccacgggtaacaaggcaagaccggtaatcactgaccttttcaagaaaattcctgagcaaaactcgtccaagagaggattggcagtgaatgactttttgcaggtgaaaggcagcaacaacattttcgccattggtgacaatgcatttgctgggttgccaccaaccgcccaagtagcgcaccaagaggccgaatatatcgccaagaattttgataaaatggctcaaataccaaatttccaaaagaatctatcttcaagaaaggataaaattgatctcttgttcgaggagaacaactttaaacctttcaaatacaacgatttaggtgccttagcatacctgggatccgaaagggccattgcaaccatacgttccggtaagagaacattttacaccggtggtggcttaatgaccttctacttatggagaattttgtacatgtccatgattctatctgcaagatcgagattaaaggtctttttcgactggattaaattagcatttttcaaaagagacttttttaaaggattatag

SEQ ID NO: 356 - DNA, 1542 bp, Artificial Sequence
  source: /note="Description of Artificial Sequence: Synthetic polynucleotide"
atgctatcgaagaatttgtatagtaaccggaggttgctcacctcgacgaatacgatggtcagattcgcttccaccagatccacaggggtggaaaactccggagcaggtcctacatcttttaagaccatgaaagtcattgaccctcagcacagcgacaaaccaaacgtgctgatactgggttcggggtggggagctatttcgtttttaaagcacattgacaccaagaagtacaacgtttccatcatctctcctagaagctatttcttatttacgcctttgttaccttctgcaccagttgggacagtagacgaaaagtcaattattgagcccatcgttaattttgctctcaagaaaaaggggaacgttacctactatgaggcagaagccacctctatcaatcccgacaggaataccgttaccataaaaaacttatctgccgttagccagctataccaacctgaaaaccatctagggctgcatcaagcagaacctgctgaaattaagtacgattatttaatcagtgctgtaggtgcggaacctaacacatttggtattcctggggtcactgattacggtcatttcctgaaggaaattcccaactctttggaaataagaagaacttttgccgccaatctagagaaggctaacttattgccaaagggtgatcccgaaagaagaagactactgtccattgtcgtggttggtggtgggcctactggtgtagaggccgctggtgaactacaggattatgttcaccaggacctgagaaagtttctccctgcattggccgaagaagtccaaattcacttggtcgaagctctgcccatcgttttgaatatgtttgagaaaaagctttcatcatacgcgcaatcacatttagaaaacacttcgatcaaagtacatctgagaacggctgtcgccaaagttgaagaaaagcaattgttggcaaagaccaaacacgaagacggtaaaataaccgaagaaactattccatacggtactttgatttgggccacgggtaacaaggcaagaccggtaatcactgaccttttcaagaaaattcctgagcaaaactcgtccaagagaggattggcagtgaatgactttttgcaggtggagggcagcaacaacattttcgccattggtgacaatgcatttgctgggttgccaccaaccgcccaagtagcgcaccaagaggccgaatatttggccaagaattttgataaaatggctcaaataccaaatttccaaaagaatctatcttcaagaaaggataaaattgatctcttgttcgaggagaacaactttaaacctttcaaatacaacgatttaggtgccttagcatacctgggatccgaaagggccattgcaaccatacgttccggtaagagaacattttacaccggtggtggcttaatgaccttctacttatggagaattttgtacttgtccatgattctatctgcaagatcgagattaaaggtctttttcgactggattaaattagcatttttcaaaagagacttttttgagggattatag

SEQ ID NO: 357 - DNA, 1542 bp, Artificial Sequence
  source: /note="Description of Artificial Sequence: Synthetic polynucleotide"
atgctatcgaagaatttgtatagtaacaagaggttgctcacctcgacgaatacgctagtcagattcgcttccaccagatccacaggggtggaaaactccggagcaggtcctacatcttttaagaccatgaaagtcattgaccctcagcacagcgacaaaccaaacgtgctgatactgggttcggggtggggagctatttcgtttttaaagcacattgacaccaagaagtacaacgtttccatcatctctcctagaagctatttcttacacacgcctttgttaccttctgcaccagttgggacagtagacgaaaagtcaattattgagcccatcgttaattttgctctcaagaaaaaggggaacgttacctactatgaggcagaagccacctctatcaatcccgacaggaataccgttaccataaaatcattatctgccgttagccagctataccaacctgaaaaccatctagggatgcatcaagcagaacctgctgaaattaagtacgattatttaatcagtgctgtaggtgcggaacctaacacatttggtattcctggggtcactgattacggtcatttcctgaaggaaattcccaactctttggaaataagaagaacttttgccgccaatctagagaaggctaacttattgccaaagggtgatcccgaaagaagaagactactgtccattgtcgtggttggtggtgggcctactggtgtagaggccgctggtgaactacaggattatgttcaccaggacctgagaaagtttttccctgcattggccgaagaagtccaaattcacttggtcgaagctctgcccatcgttttgaatatgtttgagaaaaagctttcatcatacgcgcaatcacatttagaaaacacttcgatcaaagtacatctgagaacggctgtcgccaaagttgaagaaaagcaattgttggcaaagaccaaacacgaagacggtaaaataaccgaagaaactattccatacggtactttgatttgggccacgggtaacaaggcaagaccggtaatcactgaccttttcaagaaaattcctgagcaaaactcgtccaagagaggattggcagtgaatgactttttgcaggtgaaaggcagcaacaacattttcgccattggtgacaatgcatttagcgggttgccaccaaccgcccaagtagcgcaccaagaggccgaatatttggccaagaattttgataaaatggctcaaataccaaatttccaaaagaatctatcttcaagaaaggataaaattgatctcttgttcgaggagaacaactttaaacctttcaaatacaacgatttaggtgccttagcatacctgggatccgaaagggccattgcaaccatacgttccggtaagagaacattttacaccggtggtggcttaatgaccttctacttatggagaattttgtacttgtccatgattctatctgcaagatcgagattaaaggtctttttcgactggattaaaatggcatttttcaaaagagacttttttaaaggattatag

SEQ ID NO: 358 - DNA, 1542 bp, Artificial Sequence
  source: /note="Description of Artificial Sequence: Synthetic polynucleotide"
atgctatcgaagaatttgtatagtaaccggaggttgctcacctcgacgaatacgctagtcagattcgcttccaccagatccacaggggtggaaaactccggagcaggtcctacatcttttaagaccatgaaagtcattgaccctcagcacagcgacaaaccaaacgtgctgatactgggttcggggtggggagctatttcgtttttaaagcacattgacaccaagaagtacaacgtttccatcatctctcctagaagctatttcttatttacgcctttgttaccttctgcaccagttgggacagtagacgaaaagtcaattattgagcccatcgttaattttgctctcaagaaaaaggggaacgttacctactatgaggcagaagccacctctatcaatcccgacaggaataccgttaccataaaaaacttatctgccgttagccagctataccaacctgaaaaccatctagggctgcatcaagcagaacctgctgaaattaagtacgattatttaatcagtgctgtaggtgcggaacctaacacatttggtattcctggggtcactgattacggtcatttcctgaaggaaattcccaactctttggaaataagaagaacttttgccgccaatctagagaaggctaacttattgccaaagggtgatcccgaaagaagaagactactgtccattgtcgtggttggtggtgggcctactggtgtagaggccgctggtgaactacaggattatgttcaccaggacctgagaaagtttctccctgcattggccgaagaagtccaaattcacttggtcgaagctctgcccatcgttttgaatatgtttgagaaaaagctttcatcatacgcgcaatcacatttagaaaacacttcgatcaaagtacatctgagaacggctgtcgccaaagttgaagaaaagcaattgttggcaaagaccaaacacgaagacggtaaaataaccgaagaaactattccatacggtactttgatttgggccacgggtaacaaggcaagaccggtaatcactgaccttttcaagaaaattcctgagcaaaactcgtccaagagaggattggcagtgaatgactttttgcaggtgaaaggcagcaacaacattttcgccattggtgacaatgcatttgctgggttgccaccaaccgcccaagtagcgcaccaagaggccgaatatttggccaagaattttgataaaatggctcaaataccaaatttccaaaagaatctatcttcaagaaaggataaaattgatctcttgttcgaggagaacaactttaaacctttcaaatacaacgatttaggtgccttagcatacctgggatccgaaagggccattgcaaccatacgttccggtaagagaacattttacaccggtggtggcttaatgaccttctacttatggcagattttgtacatgtccatgattctatctgcaagatcgagattaaaggtctttttcgactggattaaaatggcatttttcaaaagagacttttttaaaggattatag

SEQ ID NO: 359 - DNA, 1542 bp, Artificial Sequence
  source: /note="Description of Artificial Sequence: Synthetic polynucleotide"
atgctatcgaagaatttgtatagtaacaagaggttgctcacctcgacgaatacgctagtcagattcgcttccaccagatccacaggggtggaaaactccggagcaggtcctacatcttttaagaccatgaaagtcattgaccctcagcacagcgacaaaccaaacgtgctgatactgggttcggggtggggagctatttcgtttttaaagcacattgacaccaagaagtacaacgtttccatcatctctcctagaagctatttcttatttacgcctttgttaccttctgcaccagttgggacagtagacgaaaagtcaattattgagcccatcgttaattttgctctcaagaaaaaggggaacgttacctactatgaggcagaagccacctctatcaatcccgacaggaataccgttaccataaaaaacttatctgccgttagccagctataccaacctgaaaaccatctagggctgcatcaagcagaacctgctgaaattaagtacgattatttaatcagtgctgtaggtgcggaacctaacacatttggtattcctggggtcactgattacggtcatttcctggaggaaattcccaactctttggaaataagaagaacttttgccgccaatctagagaaggctaacttattgccaaagggtgatcccgaaagaagaagactactgtccattgtcgtggttggtggtgggcctactggtgtagaggccgctggtgaactacaggattatgttcaccaggacctgagaaagtttctccctgcattggccgaagaagtccaaattcacttggtcgaagctctgcccatcgttttgaatatgtttgagaaaaagctttcatcatacgcgcaatcacatttagaaaacacttcgatcaaagtacatctgagaacggctgtcgccaaagttgaagaaaagcaattgttggcaaagaccaaacacgaagacggtaaaataaccgaagaaactattccatacggtactttgatttgggccacgggtaacaaggcaagaccggtaatcactgaccttttcaagaaaattcctgagcaaaactcgtccaagagaggattggcagtgaatgactttttgcaggtgaaaggcagcaacaacattttcgccattggtgacaatgcatttgctgggttgccaccaaccgcccaagtagcgcaccaagaggccgaatatatcgccaagaattttgataaaatggctcaaataccaaatttccaaaagaatctatcttcaagaaaggataaaattgatctcttgttcgaggagaacaactttaaacctttcaaatacaacgatttaggtgccttagcatacctgggatccgaaagggccattgcaaccatacgttccggtaagagaacattttacaccggtggtggcttaatgaccttctacttatggagaattttgtacttgtccatgattctatctgcaagatcgagattaaaggtctttttcgactggattaaaatggcatttttcaaaagagacttttttgagggattatag

SEQ ID NO: 360 - DNA, 1542 bp, Artificial Sequence
  source: /note="Description of Artificial Sequence: Synthetic polynucleotide"
atgctatcgaagaatttgtatagtaacaagaggttgctcacctcgacgaatacgctagtcagattcgcttccaccagatccacaggggtggaaaactccggagcaggtcctacatcttttaagaccatgaaagtcattgaccctcagcacagcgacaaaccaaacgtgctgatactgggttcggggtggggagctatttcgtttttaaagcacattgacaccaagaagtacaacgtttccatcatctctcctagaagctatttcttatttacgcctttgttaccttctgcaccagttgggacagtagacgaaaagtcaattattgagcccatcgttaattttgctctcaagaaaaaggggaacgttacctactatgaggcagaagccacctctatcaatcccgacaggaataccgttaccataaaatcattatctgccgttagccagctataccaacctgaaaaccatctagggctgcatcaagcagaacctgctgaaattaagtacgattatttaatcagtgctgtaggtgcggaacctaacacatttggtattcctggggtcactgattacggtcatttcttcaaggaaattcccaactctttggaaataagaagaacttttgccgccaatctagaggaggctaacttattgccaaagggtgatcccgaaagaagaagactactgtccattgtcgtggttggtggtgggcctactggtgtagaggccgctggtgaactacaggattatgttcaccaggacctgagaaagtttctccctgcattggccgaagaagtccaaattcacttggtcgaagctctgcccatcgttttgaatatgtttgagaaaaagctttcatcatacgcgcaatcacatttagaaaacacttcgatcaaagtacatctgagaacggctgtcgccaaagttgaagaaaagcaattgttggcaaagaccaaacacgaagacggtaaaataaccgaagaaactattccatacggtactttgatttgggccacgggtaacaaggcaagaccggtaatcactgaccttttcaagaaaattcctgagcaaaactcgtccaagagaggattggcagtgaatgactttttgcaggtgaaaggcagcaacaacattttcgccattggtgacaatgcatttgctgggttgccaccaaccgcccaagtagcgcaccaagaggccgaatatatcgccaagaattttgataaaatggctcaaataccaaatttccaaaagaatctatcttcaagaaaggataaaattgatctcttgttcgaggagaacaactttaaacctttcaaatacaacgatttaggtgccttagcatacctgggatccgaaagggccattgcaaccatacgttccggtaagagaacattttacaccggtggtggcttaatgaccttctacttatggagaattttgtacttgtccatgattctatctgcaagatcgagattaaaggtctttttcgactggattaaaatggcatttttcaaaagagacttttttgagggattatag

SEQ ID NO: 361 - DNA, 1542 bp, Artificial Sequence
  source: /note="Description of Artificial Sequence: Synthetic polynucleotide"
atgctatcgaagaatttgtatagtaacaagaggttgctcacctcgacgaatacgctagtcagattcgcttccaccagatccacaggggtggaaaactccggagcaggtcctacatcttttaagaccatgaaagtcattgaccctcagcacagcgacaaaccaaacgtgctgatactgggttcggggtggggagctatttcgtttttaaagcacattgacaccaagaagtacaacgtttccatcatctctcctagaagctatttcttacacacgcctttgatgccttctgcaccagttgggacagtagacgaaaagtcaattattgagcccatcgttaattttgctctcaagaaaaaggggaacgttacctactatgaggcagaagccacctctatcaatcccgacaggaataccgttaccataaaaaacttatctgccgttagccagctataccaacctgaaaaccatctagggctgcatcaagcagaacctgctgaaattaagtacgattatttaatcagtgctgtaggtgcggaacctaacacatttggtattcctggggtcactgattacggtcatttcttcaaggaaattcccaactctttggaaataagaagaacttttgccgccaatctagaggaggctaacttattgccaaagggtgatcccgaaagaagaagactactgtccattgtcgtggttggtggtgggcctactggtgtagaggccgctggtgaactacaggattatgttcaccaggacctgagaaagtttctccctgcattggccgaagaagtccaaattcacttggtcgaagctctgcccatcgttttgaatatgtttgagaaaaagctttcatcatacgcgcaatcacatttagaaaacacttcgatcaaagtacatctgagaacggctgtcgccaaagttgaagaaaagcaattgttggcaaagaccaaacacgaagacggtaaaataaccgaagaaactattccatacggtactttgatttgggccacgggtaacaaggcaagaccggtaatcactgaccttttcaagaaaattcctgagcaaaactcgtccaagagaggattggcagtgaatgactttttgcaggtgaaaggcagcaacaacattttcgccattggtgacaatgcatttgctgggttgccaccaaccgcccaagtagcgcaccaagaggccgaatatttggccaagaattttgataaaatggctcaaataccaaatttccaaaagaatctatcttcaagaaaggataaaattgatctcttgttcgaggagaacaactttaaacctttcaaatacaacgatttaggtgccttagcatacctgggatccgaaagggccattgcaaccatacgttccggtaagagaacattttacaccggtggtggcttaatgaccttctacttatggagaattttgtacttgtccatgattctatctgcaagatcgagattaaaggtctttttcgactggattaaattagcatttttcaaaagagacttttttaaaggattatag

SEQ ID NO: 362 - DNA, 1542 bp, Artificial Sequence
  source: /note="Description of Artificial Sequence: Synthetic polynucleotide"
atgctgtcgaagaatttgtatagtaaccggcggttgctgacctcgaccaacacgatggtgcgcttcgctagcaccagatccacaggcgtggaaaactccggagcaggccctacatcttttaagaccatgaaggtcatcgacccccagcacagcgacaaaccaaacgtgctgatactgggttcggggtggggcgctatttcgtttttaaagcacattgacaccaagaagtacaacgtcagcatcatctctcctagaagctacttcctgtttacgcccttgatgcctagcgcaccagtggggacagtagacgaaaagtcaattattgagcccatcgtgaatttcgctctcaagaaaaaggggaacgttacctactatgaggcagaagccacctctatcaaccccgaccggaacaccgtgaccatcaaatcattatctgccgtgagccagctataccaacccgaaaaccatctggggctgcatcaagcagaacctgctgaaattaagtacgattatttaatcagtgctgtaggtgccgaacctaacacctttggtatccccggcgtcactgattacggccacttcctgaaggaaattcccaacagcctggaaataagacggacttttgccgccaatctagaagaggctaacttattgccaaagggtgatcccgaaagaagaagactactgagcattgtcgtcgttggtggagggcctacaggcgtagaggccgctggtgaactacaggattatgttcaccaggacctgcggaagtttttccccgcattggccgaggaagtccagattcacttggtggaagccctgcccatcgtgttgaatatgtttgagaaaaagcttagctcatacgcgcaatcacatttagaaaacacctcgatcaaagtacatctgagaacggctgtggccaaagttgaagaaaagcaattgctggcaaagaccaaacacgaggacggtaaaataaccgaggaaactattccatacggcactctgatttgggccacgggtaacaaggcaagacccgtaatcaccgacctgttcaagaaaatccctgagcaaaactcgtccaagagaggattggccgtgaatgacttcttgcaggtcaaaggcagcaacaacatcttcgccattggtgacaacgcatttgctggcttgccaccaaccgcccaggtagcgcaccaggaagccgaatatttggccaagaacttcgataagatggcccagatcccaaatttccagaagaacctatcttcacggaaggataaaattgacctgttgttcgaggaaaacaacttcaagcccttcaaatacaacgatttaggtgccttagcatacctgggctccgaaagggccattgccaccatacgttccggtaagagaacattttacaccggcggtggcctgatgaccttctacttatggagaattttgtacttgtccatgattctaagcgcaagatcgagactgaaggtcttcttcgactggattaagttagcatttttcaaaagagacttttttaaaggactgtga

SEQ ID NO: 363 - DNA, 1542 bp, Artificial Sequence
  source: /note="Description of Artificial Sequence: Synthetic polynucleotide"
atgctatcgaagaacttgtacagtaacaagaggttgctgacctcgacgaataccctagtgcgcttcgcttccaccagatccaccggcgtggaaaactccggagcaggtcccacatcttttaagaccatgaaagtcattgaccctcagcacagcgacaaacccaacgtgctgatactgggttcgggctggggcgctattagctttctgaagcacattgacaccaagaagtacaacgttagcatcatctctcccagaagctacttcttatttacccctctgttaccttctgcacctgttgggacagtagacgaaaagtcaatcattgagcccatcgtgaattttgccctcaagaaaaaggggaacgtcacctactacgaggcagaggccacctctatcaatcccgaccggaataccgttaccataaagtcattatctgccgttagccagctataccaacccgaaaaccatctgggcatgcatcaagcagaacctgctgagattaagtacgattacctgatcagtgctgtaggtgcggaacctaacacctttggtattcctggggtcactgactacggtcatttcctggaggaaattcccaactctttggaaataagaagaaccttcgccgccaacctggagaaggctaacttattgcctaagggtgaccccgaaagaagaagactgctgagcattgtcgtcgtgggtggaggccctactggtgtggaagccgctggcgagctacaggactacgttcaccaggacctgagaaagttcttccccgcactggccgaagaagtgcaaattcacctggtcgaagccctgcccatcgttttgaatatgtttgagaaagagcttagctcatacgcgcaaagccatttagaaaacacttcgatcaaagtacatctgagaaccgccgtcgccaaggttgaagagaagcaattgttggcaaagaccaaacacgaagacggtaaaataaccgaggaaaccattccatacggtactttgatttgggccaccggtaacaaggccagacccgtgatcactgacctgttcaagaaaatccctgagcaaaactcgagcaagagaggattggcagtgaatgacttcttgcaggtggagggcagcaacaacattttcgccattggtgacaatgcatttgctgggctgcctcctaccgcccaggtagcgcaccaagaggccgaatacttggccaagaactttgataaaatggctcaaataccaaatttccaaaagaatctatcttcaagaaaggataaaattgatctcctgttcgaggagaacaactttaaacctttcaaatacaacgatttaggtgccttagcatacctgggctccgaaagggccattgcaaccatacgttccggcaagagaacattttacaccggtggtggcttaatgaccttctacttatggagaattctgtacctgtccatgatcctgagcgcaagaagcagattaaaggtgtttttcgactggatcaagctggcattcttcaaaagagacttcttcaaaggcttatga

SEQ ID NO: 364 - DNA, 1542 bp, Artificial Sequence
  source: /note="Description of Artificial Sequence: Synthetic polynucleotide"
atgctaagcaagaatttgtatagtaacaagaggttgctcaccagcacgaacacgctagtcagattcgcctccaccagatccacaggggtggaaaactccggggcaggtcctacaagcttcaagaccatgaaagtcattgacccccagcacagcgacaaaccaaacgtgctgatcctgggttcgggctggggagccatctcgtttttaaagcacattgacaccaagaagtacaacgtttccatcatcagccctagaaagtatttcttattcacccccttgttacctagcgccccagttgggacagtagacgaaaagtccattattgagcccatcgtgaattttgccctcaagaaaaaggggaacgtcacctactatgaggcagaagccacctctatcaatcccgaccggaacaccgttaccataaaaaacctgagcgccgtgagccagctataccaacctgaaaaccatctggggctgcatcaagcagaacctgccgaaattaagtacgattatttaatcagcgctgtgggtgcggaacccaacacatttggtatccctggggtcactgattacggtcatttcctgaaggaaattcccaactctttggaaatccggagaacttttgccgccaatctggagaaggctaacttattgcctaagggtgatcccgaaagaagaaggctactgagcattgtcgtggtgggtggtgggcctactggtgtagaagccgctggtgagctgcaggattacgttcaccaggacctgagaaagtttctccctgccttggccgaagaagtccagattcacttggtggaagccctgcccatcgtgttgaatatgtttgagaaggagctttcatcatacgcgcaatcacacttagaaaacacctcgatcaaggtgcatctgagaacggctgtggccaaagtggaagagaagcagttgctggcaaagaccaaacacgaagacggtaaaattaccgaggaaactatcccatacggcaccttgatttgggccacgggtaacaaggcaagaccggtaatcaccgaccttttcaagaaaatccctgagcaaaactcgtccaagcggggactggccgtgaatgactttctgcaggtggagggcagcaacaacatcttcgccatcggcgacaacgcctttgctggcttgccaccaaccgcccaggtagcgcaccaagaggccgaatatatcgccaagaattttgataaaatggctcaaataccaaatttccaaaagaatctatcctccagaaaggataagatcgatctcttgttcgaggagaacaactttaagcctttcaagtacaacgatttaggtgccttagcatacctgggatccgaaagggccattgccaccatacgttccggtaagcggaccttctacaccggcggtggcttaatgaccttctacttatggagaatcttgtacctgtccatgatcctatctgccagatcgagactgaaggtctttttcgactggatcaaattagccttcttcaaaagggacttttttaagggattatga

SEQ ID NO: 365 - DNA, 1542 bp, Artificial Sequence
  source: /note="Description of Artificial Sequence: Synthetic polynucleotide"
atgctatcgaagaatttgtatagtaacaagcggttgctcacctcgacgaatacgatggtcagattcgcctccaccagatccacaggggtggaaaacagcggggcaggtcctacatcttttaagaccatgaaggtcattgaccctcagcacagcgacaaaccaaacgtgctgatactgggttcggggtggggcgctatttcgtttttaaagcacatcgacaccaagaagtacaacgtttccatcatctctcccagaaagtatttcttatttacgcctttgttaccttctgccccagttgggaccgtggacgaaaagtccattattgagcccatcgttaattttgctctgaagaaaaagggcaacgttacctactatgaggccgaagccacctctatcaaccccgacaggaataccgtgaccatcaaaagcttatctgccgtttcccagctgtaccaacccgaaaaccatctagggctgcatcaggcagagcctgccgaaattaagtacgattatttaatcagtgctgtaggcgcggaacccaacacatttggtattcccggcgtcactgattacggtcatttcctgaaagagattcccaactctttggaaatcagaagaacctttgccgccaatctagagaaggctaacttattgcctaagggcgaccccgaaagaagaagactactgtccatcgtcgtcgttggtggtggccccactggcgtggaggccgctggcgaactgcaggattatgttcaccaggacctgcggaagtttttccccgccttggccgaagaagtccaaattcacttggtcgaagccctgcccatcgtgttgaatatgttcgagaaaaagctttcatcatacgcgcagtcacatctggaaaacacctcgatcaaagtgcatctgagaacggctgtcgccaaagtggaagaaaagcaattgctggcaaagaccaaacacgaagacggcaaaattaccgaggaaactattccctacggcactctgatttgggccaccggcaacaaggccagaccggtaatcactgaccttttcaagaaaattcctgagcaaaactcgtccaagagaggattggcagtgaatgactttttgcaggtcaaaggcagcaacaacattttcgccattggtgacaacgcctttgctgggttgccaccaacagcccaagtggcccaccaagaggccgagtatctggccaagaactttgataagatggctcagataccaaatttccaaaagaacctatcttccagaaaggataagattgatctcttgttcgaggagaacaactttaaacccttcaagtacaacgacctgggtgccctggcatacctgggctccgaaagggccattgcaaccatacgttccggcaagagaaccttctacaccggtggaggcctgatgaccttctacttatggcggattttgtacttgtccatgattctaagcgcacgcagcagactgaaggtctttttcgactggattaaaatggcatttttcaaaagggacttttttgagggcctgtga

SEQ ID NO: 366 - DNA, 1542 bp, Artificial Sequence
  source: /note="Description of Artificial Sequence: Synthetic polynucleotide"
atgctatcgaagaatttgtatagtaacaagcggttgctgacctcgaccaacacgctcgtgagattcgcttccaccagatccaccggggtggaaaactccggggcaggccctacatcttttaagaccatgaaagtcatcgaccctcagcacagcgacaaacccaacgtgctgatcctgggttcggggtggggagctattagctttttaaagcacattgacaccaagaagtacaacgttagcatcatcagccccagaaagtacttcttattcacccctctgttaccttctgcaccagttgggacagtagacgagaagtcaattattgagcccatcgttaattttgctctcaagaaaaaggggaacgtcacctactatgaggcagaggccaccagcatcaatcccgaccggaataccgtgaccataaaatcactgtctgccgttagccagctataccagcctgagaaccatctgggcctgcaccaagcagaacccgctgaaattaagtacgattatttaatcagtgctgtaggtgccgaacctaacacctttggtattcctggcgtcactgattacggtcatttcctgaaagaaattcccaacagcttggaaatacggagaacctttgccgccaatctagagaaggctaacttattgcctaagggcgaccccgaaagaagaagactgctgtccattgtggtggtgggtggtgggcccactggcgtagaggctgctggtgagctacaggattatgttcaccaggacctgagaaagtttctccctgccttggccgaagaagtgcaaattcacttggtcgaagctctgcccatcgttttgaacatgttcgagaaaaagcttagcagctacgcgcaatcacatttagaaaacacttccatcaaagtacacctgagaacggctgtggccaaagtggaagaaaagcagttgctggcaaagaccaaacacgaggacggcaagataaccgaagaaactattccatacggtactttgatttgggccacgggtaacaaggcaagacccgtaatcaccgacctgttcaagaagattcctgagcagaactcgtccaagcggggattggccgtgaatgacttcctgcaggtcgagggcagcaacaacatcttcgccattggcgacaatgcatttgccgggttgccaccaaccgcccaagtagcgcaccaagaagccgaatatatcgccaagaattttgacaagatggctcaaatcccaaatttccaaaagaatctgtcttcaagaaaggataagattgatctcttgttcgaggagaacaactttaaacctttcaaatacaacgatctgggcgccctggcatacctgggaagcgaaagggccattgcaaccatccgtagcggtaagagaacattctacaccggtggtggcctgatgaccttctacttatggagaattctgtacatgtccatgattctatctgccagatcgagattaaaggtctttttcgactggattaagttagccttcttcaagagagacttttttgagggactgtag

SEQ ID NO: 367 - DNA, 1542 bp, Artificial Sequence
  source: /note="Description of Artificial Sequence: Synthetic polynucleotide"
atgctatcgaagaatctgtacagtaacaagcggttgctcacctcgacgaataccctcgtcagattcgctagcaccagatccacaggcgtcgaaaactccggggcaggtcctacatctttcaagaccatgaaagtcattgacccccagcacagcgacaaaccaaacgtgctgatactgggctctgggtggggagctatttcgtttctgaagcacattgacaccaagaagtacaacgttagcatcatctctcctagaaagtacttcttacacacgcccctgttaccttctgcaccagtggggaccgtagacgaaaagtccatcattgagcccatcgttaatttcgctctcaagaaaaaggggaacgttacctactatgaggcagaagccacctctatcaatcccgacaggaataccgttaccatcaaatcattaagcgccgtttcccagctataccagcctgaaaaccacctaggcatgcaccaagcagaacccgctgagattaagtacgattatctgatcagtgccgtaggtgcggaacccaacacatttggaatccctggggtcaccgattacggtcatttcctggaggaaatccccaactctctggaaataagaagaacttttgccgccaatctagagaaggccaacctgttgccaaagggtgatcccgaacggagaagactactgagcattgtggtggttggcggtggccctactggtgtagaagctgctggtgaactacaggactatgtgcaccaggacctgagaaagttcttccctgcattggccgaagaagtgcaaattcacttggtcgaagctctgcccatcgtgttgaacatgtttgagaagaagcttagcagctacgcgcagtcacatttagaaaacacttccatcaaagtgcatctgagaaccgccgtcgccaaagttgaagaaaagcagttgttggccaagaccaaacacgaagacggtaaaataaccgaagaaaccattccatacggtactctgatttgggccaccggcaacaaggcaagaccggtaatcactgaccttttcaagaagattcctgagcaaaacagctccaagagaggattggcagtgaatgactttttgcaggtgaaaggcagcaacaacatcttcgccattggtgacaatgcatttgccgggctgccaccaaccgcccaagtagcgcaccaagaggccgaatatctggccaagaacttcgataagatggctcaaatcccaaatttccagaagaatctatcttcacggaaggataaaattgacctcttgttcgaggaaaacaacttcaaacctttcaagtacaacgatttaggcgccctggcatacctgggatccgaaagagccattgccaccatacgttccggtaagagaaccttctacaccggtggtggcttaatgaccttctacctgtggagaattttgtacctgagcatgattctaagcgccagatcgagattaaaggtctttttcgactggatcaaactggcctttttcaaaagagacttttttaaaggattatag

SEQ ID NO: 368 - DNA, 1542 bp, Artificial Sequence
  source: /note="Description of Artificial Sequence: Synthetic polynucleotide"
atgctatcgaagaacttgtacagcaacaagaggctgctcacctcgacgaatacgatggtccgcttcgcttccaccagatccacaggggtggaaaactccggagcaggccctacatcttttaagaccatgaaagtcatcgaccctcagcacagcgacaagccaaacgtgctgatactgggttctgggtggggagccatttcgtttttaaagcacattgacaccaagaagtacaacgtctccatcatcagccctagaaagtacttcttacacacgcctctgttaccctctgcaccagttggaaccgtagacgaaaagtcaattattgagcccatcgttaactttgccctcaagaaaaaggggaacgtcacctactatgaggcagaagccaccagcatcaaccccgaccggaataccgtgaccataaagtcattatctgccgttagccagctataccaacctgaaaaccatctagggctgcatcaagcagagcctgctgagattaagtacgactacttaatcagtgctgtgggcgcggagcctaacacatttggaatccccggcgtcactgattacggtcatttcctggaggaaattcccaacagcttggaaataagacggacttttgccgccaacctggaaaaggctaacctgttgccaaagggcgatcccgaacggagaaggctactgagcattgtcgtggttggcggtgggcctactggtgtggaggctgctggtgaactacaggattatgttcaccaggacctgagaaagtttctccctgcactggccgaggaagtgcagattcacttggtggaagctctgcccatcgttctgaatatgtttgagaaaaagctgtcatcatacgcgcaaagccatttagaaaacacctcgatcaaagtacacctgagaacggccgtcgccaaagttgaagaaaagcaattgctggcaaagaccaaacacgaggacggtaaaattaccgaggaaactattccatacggcactttgatttgggccacgggtaacaaggcaagaccggtaatcaccgaccttttcaagaaaattcctgagcagaacagcagcaagagaggcctggccgtgaacgactttttgcaggtcaaaggcagcaacaacattttcgccattggtgacaatgcctttgccggcttgccaccaacagcccaagtagcgcaccaagaggccgagtacttggccaagaactttgataaaatggctcagataccaaatttccaaaagaacctatcctcaagaaaggataaaattgatctcctgttcgaggagaacaactttaaacccttcaaatacaacgatttaggtgccttagcatacctgggaagcgaaagagccattgcaaccatacgttccggcaagagaaccttctacaccggtggaggcttaatgaccttctacctgtggcagattttgtacttgtccatgattctatctgcaagaagcagattaaaggtctttttcgactggattaagttagcatttttcaaaagggacttttttaaaggattatag

SEQ ID NO: 369 - DNA, 1542 bp, Artificial Sequence
  source: /note="Description of Artificial Sequence: Synthetic polynucleotide"
atgctgtcgaagaatttgtacagtaacaagaggctgctcacctcgaccaacacgctcgtgcgcttcgcttccaccagatccacaggcgtggaaaacagcggagcaggtcccacaagctttaagaccatgaaggtcattgaccctcagcacagcgacaaaccaaacgtgctgatactgggttctgggtggggagctattagctttttaaagcacattgacaccaagaagtacaacgtttccatcatcagccctagaaagtatttcctgtttacccctttgttaccttctgccccagtgggaacagtggacgagaagtcaatcattgagcccatcgttaattttgccctgaagaaaaagggcaacgtcacctactatgaggcagaagccacctctatcaatcccgacaggaataccgtgaccataaaaaacttatctgccgttagccagctataccaacctgagaaccatctagggctgcaccaggccgaacctgctgaaattaagtacgactatttaatcagtgccgtaggtgcggaacctaacacatttggtattcccggggtcaccgattacggccacttcctggaggaaattcccaactctctggaaataagaagaacttttgccgccaatctagaaaaggccaacctgttgcctaagggtgatcccgaaagaagaagactactgtccattgtcgtggttggtggtgggcctacaggcgtagaggctgctggtgagctacaggattatgttcaccaggacctgagaaagtttttccccgccctggccgaagaagtccaaattcacttggtcgaagctctgcccatcgttttgaatatgttcgagaagaagctttcatcatacgcgcaatcacatttagaaaacacttcgatcaaagtgcatctgagaacggctgtggccaaagttgaagaaaagcaattgttggccaagaccaagcacgaagacggcaaaataaccgaagaaactattccctacggtactttgatttgggccacgggtaacaaggcaagacccgtaatcaccgacctgttcaagaagattcctgagcaaaacagctccaagagaggattggccgtgaatgactttttgcaggtcaaaggcagcaacaacattttcgccattggcgacaatgcatttagcggcttgccaccaaccgcccaagtggcgcaccaggaggccgagtacttggccaagaattttgacaagatggctcaaataccaaatttccagaagaatctatcttcacggaaggataaaatcgacctcttgttcgaggagaacaacttcaaacccttcaaatacaacgatttaggcgccttagcctacctgggaagcgaaagggccattgccaccataagatccggtaagagaacattttacaccggtggtggcttaatgaccttctacttatggagaattttgtacttgagcatgatcctatctgccagatcgagactgaaggtgtttttcgactggatcaaactggcatttttcaagagggactttttcaagggactgtag

SEQ ID NO: 370 - DNA, 1542 bp, Artificial Sequence
  source: /note="Description of Artificial Sequence: Synthetic polynucleotide"
atgctatcgaagaacctgtatagtaacaagcggttgctgacctcgacgaatacgatggtcagattcgctagcaccagatccacaggggtggaaaactccggagcaggtcctacatctttcaagaccatgaaagtcattgaccctcagcacagcgacaagccaaacgtgctgatactgggctcggggtggggagctatttcgtttttaaagcacattgacaccaagaagtacaacgtcagcatcatctctcccagaaagtacttcttatttacgcctctgttacctagcgcaccagttgggaccgtggacgaaaagtcaattattgagcccatcgtgaattttgccctcaagaaaaaggggaacgtcacctactatgaggccgaagccacctctatcaaccccgacaggaacaccgtgaccatcaaatcattatctgccgttagccagctgtaccaacctgagaaccacctagggctgcaccaagcagagcctgccgaaattaagtacgactatttaatcagtgccgtaggtgcggagcccaacacatttggaatccccggcgtcaccgactacggtcatttcttcaaggaaatccccaactctttggaaatccggcggacttttgccgccaatctagaaaaggctaacttactgccaaagggtgatcccgaaagaagaagactgctgagcattgtggtcgtgggtggtgggcctacaggcgtggaggccgctggtgagctacaggactatgtgcaccaggacctgagaaagtttctgcccgcattggccgaggaagtccaaattcacttggtggaagctctgcccatcgttttgaatatgttcgagaaaaagctttcaagctacgcgcaaagccatttagaaaacacttcgatcaaagtacatctgagaaccgctgtcgccaaagttgaagaaaagcaattgttggccaagaccaagcacgaggacggcaaaattaccgaagaaactattccatacggcactttgatttgggccaccggtaacaaggcaagaccggtaatcactgacctgttcaagaagattcccgagcagaactcgagcaagagaggcttggcagtgaacgactttttgcaggtgaaaggcagcaacaacattttcgccattggcgacaatgcatttgccgggttgccaccaaccgcccaagtagcgcaccaagaggccgaatatctggccaagaattttgataaaatggctcagataccaaatttccaaaagaatctatcttccagaaaggataaaattgatctcttgttcgaggagaacaactttaagcctttcaagtacaacgatttaggcgccttagcatacctgggcagcgaaagggccattgcaaccatacgttccggtaagagaacattttacaccggtggtggcttaatgaccttctacttatggcagatcttgtacctgagcatgattctaagcgccagatcgagattaaaggtctttttcgactggattaagatggcattcttcaaaagagactttttcaagggactgtag

SEQ ID NO: 371 - DNA, 1542 bp, Artificial Sequence
  source: /note="Description of Artificial Sequence: Synthetic polynucleotide"
atgctatcgaagaatctgtatagtaacaagcggttgctcacctcgacgaataccctcgtgagattcgcttccaccagatccacaggggtggaaaactccggagctggccctacctctttcaagaccatgaaggtcattgacccccagcacagcgacaaaccaaacgtgctgatactgggttcggggtggggcgctatttcgtttttaaagcacatcgacaccaagaagtacaacgtctccatcatcagccctagaaagtatttcctgtttacgcccctgttaccctctgcacctgttgggacagtagacgagaagtcaattattgagcccatcgttaatttcgctctgaagaaaaagggcaacgttacctactatgaggccgaagccacctctatcaatcccgacaggaataccgtgaccatcaagtcactgagcgccgttagccagctataccaacctgaaaaccatctggggatgcaccaagcagaacctgctgaaattaagtacgattatttaatcagtgctgtaggcgccgaacctaacacatttggtattcctggggtcactgattacggtcatttcctgaaggaaattcccaactctttggaaataagaagaacctttgccgccaacctagaggaggctaacttattgccaaagggcgaccccgagagaagaagactactgtccatcgtcgtggttggcggtgggcctactggtgtggaggccgctggcgaactacaggattatgttcaccaggacctgagaaagtttctccctgccttggccgaggaagtccagattcacctggtcgaagctctgcccatcgttttgaatatgtttgagaaaaagctttcatcatacgcgcaatcacatctggaaaacacctcgatcaaagtacatctgagaacggccgtggccaaagttgaagaaaagcagttgctggcaaagaccaaacacgaagacggcaaaataaccgaggaaactattccatacggcaccttgatttgggccaccggtaacaaggcaagaccggtaatcactgaccttttcaagaagattcccgagcaaaactcgtccaagcggggcttggcagtgaatgacttcttgcaggtcaaaggcagcaacaacattttcgccattggcgacaatgcctttagcgggttgccaccaaccgcccaagtagcgcaccaggaggccgaatacctggccaagaattttgataaaatggcccaaatacccaatttccagaagaatctatcttcaagaaaggataaaatcgatctgctgttcgaggagaacaacttcaagcctttcaaatacaacgatctgggtgccttagcctacctgggatccgaaagggccattgccaccatcagatccggtaagagaacattttacaccggtggtggcctgatgaccttctacttatggcggatcttgtacctgagcatgattctgagcgcccgctcgagactgaaggtctttttcgactggattaagatggcattcttcaagagagacttctttaaaggcttatga

SEQ ID NO: 372 - DNA, 1542 bp, Artificial Sequence
  source: /note="Description of Artificial Sequence: Synthetic polynucleotide"
atgctatcgaagaatttgtacagtaacaagaggctgctcaccagcacgaacaccctagtcagattcgcttccaccagatccacaggggtggaaaacagcggagctggtcctacatcttttaagaccatgaaggtcattgaccctcagcacagcgacaagccaaacgtgctgatactgggttcggggtggggagctatttcgtttttaaagcacatcgacaccaagaagtacaacgtcagcatcatctctcctagaagctatttcttacacacgcctttgttacctagcgccccagttggaacagtagacgaaaagtccatcattgagcccatcgtgaacttcgccctcaagaaaaaggggaacgtcacctactatgaggcagaagccaccagcatcaaccccgaccggaataccgttaccataaaatcactgtctgccgttagccagctataccaacctgaaaaccatctagggctgcatcaagcagaacctgctgaaattaagtacgattatttaatcagcgctgtgggtgccgaacctaacacctttggtattcctggggtgactgactacggccatttcctggaggaaatccccaactctttggaaataagaagaacttttgccgccaatctggaggaggctaacttactgcctaagggtgaccccgaacggagaagactgctgagcattgtcgtcgttggtggaggccctacaggcgtagaggctgctggtgaactacaggattacgttcaccaggacctgagaaagtttctccccgcactggccgaggaagtccaaattcacctggtcgaagctctgcccatcgttctgaatatgttcgagaagaagcttagctcatacgcccaatcacacttagaaaacacttcgatcaaggtacatctgagaaccgctgtcgccaaagttgaagaaaagcagttgctggcaaagaccaaacacgaggacggtaaaataaccgaagaaactattccatacggcactttgatttgggccacgggcaacaaggcaagaccggtaatcactgaccttttcaagaaaattcctgagcagaactcgagcaagcggggactggcagtgaatgactttctgcaggtcaaaggcagcaacaacatcttcgccattggtgacaatgcatttgctggcttgccaccaacagcccaggtagcgcaccaggaggccgagtacatcgccaagaactttgataaaatggcccaaataccaaatttccaaaagaatctatcttcacggaaggataagatcgatctcttgttcgaggagaacaacttcaaacctttcaaatacaacgatttaggtgccttagcctacctgggatccgaaagagccattgcaaccatacgttccggtaagagaacattttacaccggtggtggcttaatgaccttctacctgtggagaattctgtacttgagcatgatcctgtctgcccgcagcagattaaaggtctttttcgactggattaagatggcctttttcaagagagacttttttaagggattatag

SEQ ID NO: 373 - DNA, 1542 bp, Artificial Sequence
  source: /note="Description of Artificial Sequence: Synthetic polynucleotide"
atgctatcgaagaatttgtacagtaacaagaggttgctcacctcgacgaacacgctagtcagattcgcttccaccagatccacaggggtcgaaaactccggagcaggtcctacatcttttaagaccatgaaagtcattgaccctcagcacagcgacaagcccaacgtgctgatactgggctcggggtggggagctatctcgtttttaaagcacattgacaccaagaagtacaacgttagcatcatcagccctagaaagtatttcttatttacgcccttgttacctagcgcaccagttgggacagtggacgaaaagtcaattatcgagcccatcgttaatttcgccctcaagaaaaaggggaacgttacctactatgaggcagaagccacctctatcaatcccgaccggaataccgttaccataaaaagcttaagcgccgtttcccagctgtaccagcctgaaaaccatctaggcctgcatcaagcagagcctgctgaaattaagtacgattacttaatcagtgctgtgggcgccgaacccaacacatttggaattcccggggtcaccgattacggccatttcttcgaggaaattcccaactctctggaaataagaagaacctttgccgccaacctagagaaggctaacctgctgcctaagggtgatcccgagagaagaagactactgagcattgtcgtggtgggtggtgggcctactggcgtagaggccgctggtgaactgcaggattacgttcaccaggacctgagaaagtttctgcctgccttggccgaggaagtccagattcacttggtcgaagccctgcccatcgttttgaatatgtttgagaaagagctttcatcatacgcccaatcacacctggaaaacacttcgatcaaggtacatctgagaacggctgtggccaaagtggaagaaaagcagttgttggcaaagaccaaacacgaggacggcaaaataaccgaggaaactattccatacggcactctgatttgggccacgggtaacaaggccagacccgtaatcactgacctgttcaagaagatccctgagcagaactcgtccaagcggggactggcagtgaacgactttttgcaggtcgagggcagcaacaacatcttcgccattggtgacaatgcctttgccgggctgccaccaaccgcccaagtagcgcaccaggaagccgaatatttggccaagaattttgacaaaatggctcagatcccaaatttccaaaagaatctatcctccagaaaggataaaattgatctcttgttcgaggagaacaactttaaacctttcaaatacaacgacctgggcgccttagcctacctgggaagcgaaagagccattgcaaccataagatccggcaagagaacattctacaccggtggtggcttaatgaccttctacttatggcggattttgtacttgagcatgattctatctgcaagaagcagattaaaggtctttttcgactggattaaattagcatttttcaaaagggactttttcaagggactgtga

SEQ ID NO: 374 - DNA, 1542 bp, Artificial Sequence
  source: /note="Description of Artificial Sequence: Synthetic polynucleotide"
atgctgtcgaagaatttgtatagtaacaagaggttgctgaccagcacgaataccctagtcagattcgcttccaccagatccaccggggtggaaaactccggagcaggtcctacaagctttaagaccatgaaagtcattgacccccagcacagcgacaagccaaacgtgctgatactgggttcggggtggggagctatttcgtttttaaagcacattgacaccaagaagtacaacgttagcatcatctctcccagaaagtatttcttatttacgcccttgttaccttctgccccagttgggacagtggacgaaaagtcaatcattgagcccatcgttaacttcgccctcaagaaaaagggcaacgttacctactatgaggcagaagccacctctatcaaccccgacaggaataccgtgaccatcaagagcttatctgccgtttcccagctataccaacctgaaaaccatctagggatgcaccaagccgagcccgccgaaattaagtacgattatttaatcagtgctgtaggtgcggagcccaacacatttggtatccctggcgtcaccgattacggccatttcctggaggagattcccaactctttggaaatcagaagaactttcgccgccaacctggaaaaggctaacttattgccaaagggtgatcccgaaagaagaagactactgtccattgtcgtcgttggtggtgggcctacaggtgtagaagctgctggcgagctacaggattacgtgcaccaggacctgagaaagttcttccccgcattggccgaagaagtccaaattcacttggtcgaagctctgcccatcgttttgaacatgtttgagaaaaagctttcaagctacgcccagtcacacttagaaaacacttcgatcaaggtacatctgagaacggctgtggccaaggttgaagagaagcaactgctggcaaagaccaagcacgaagacggtaaaataaccgaagaaactattccatacggtactctgatttgggccacgggtaacaaggcaagacccgtaatcactgaccttttcaagaaaattcctgagcaaaactcgagcaagagaggcctggcagtgaatgacttcttgcaggtgaaaggcagcaacaacattttcgccattggtgacaacgcatttgctggcctgccaccaaccgcccaagtagcgcaccaagaggccgaatatttggccaagaactttgataagatggctcaaatacccaatttccaaaagaatctatcttccagaaaggataaaatcgacctcttgttcgaggagaacaacttcaaacctttcaagtacaacgatttaggcgccctggcatacctgggaagcgaaagggccattgcaaccatccgttccggtaagagaaccttctacaccggcggtggcctgatgaccttctacctgtggcggattctgtacctgtccatgattctatctgcacgctcgagactgaaggtgttcttcgactggattaaattagcatttttcaagagagacttcttcaaaggcttatag

SEQ ID NO: 375 - DNA, 1542 bp, Artificial Sequence
  source: /note="Description of Artificial Sequence: Synthetic polynucleotide"
atgctatcgaagaatctgtacagtaacaagcggctgctcacctcgaccaatacgctcgtccgcttcgcttccaccagatccaccggggtggaaaactccggagcaggtcccacatctttcaagaccatgaaagtcatcgaccctcagcacagcgacaagccaaacgtgctgatactgggctcggggtggggagccatcagctttctgaagcacattgacaccaagaagtacaacgtttccatcatctctcctagaagctatttcttatttacgcccctgttaccttctgcaccagtggggacagtagacgaaaagtcaattattgagcccatcgttaacttcgctctcaagaaaaaggggaacgtcacctactatgaggccgaagccaccagcatcaaccccgaccggaataccgttaccatcaaaagcctgtctgccgttagccagctataccaacctgaaaaccatctagggatgcaccaagcagaacccgctgagattaagtacgattatttaatcagtgctgtaggcgcggaacccaacacatttggtatccctggcgtcactgattacggtcatttcttcgaggaaatccccaactctctggaaataagaagaacttttgccgccaatctagagaaggctaacttattgccaaagggtgaccccgaaagaagaagactactgtccattgtggtcgtgggcggtggccctactggtgtagaggccgctggtgagctgcaggattatgttcaccaggacctgcggaagttcctccctgcattggccgaagaagtccagattcacctggtcgaagctctgcccatcgttctgaacatgttcgagaagaagcttagcagctacgcgcaatcacacctggaaaacacttcgatcaaggtacacctgagaaccgccgtcgccaaggttgaagaaaagcagttgttggccaagaccaagcacgaagacggtaaaataaccgaagaaaccattccatacggcactctgatttgggccacgggtaacaaggcaagacccgtaatcactgaccttttcaagaaaattcccgagcaaaacagctccaagagaggcttggccgtgaatgactttttgcaggtcaaaggcagcaacaacattttcgccattggtgacaatgcatttagcgggctgccacctaccgcccaggtagcgcaccaagaggccgaatatctggccaagaattttgacaaaatggcccaaataccaaatttccaaaagaacctatcttcaagaaaggataaaattgacctcttgttcgaggagaacaacttcaagcctttcaagtacaacgatttaggtgccttagcatacctgggatccgaaagggccattgcaaccatcagatccggcaagagaacattttacaccggtggtggcttaatgaccttctacctgtggagaattttgtacttgagcatgattctaagcgcacgctcgagactgaaggtcttcttcgactggattaagatggcatttttcaaaagagactttttcaaaggattatga

SEQ ID NO: 376 - DNA, 1542 bp, Artificial Sequence
  source: /note="Description of Artificial Sequence: Synthetic polynucleotide"
atgctaagcaagaatttgtatagtaacaagaggctgctcacctcgacgaacacgatggtcagattcgcctccaccagatccaccggggtggaaaactccggggctggtcctaccagctttaagaccatgaaagtcattgaccctcagcacagcgacaaaccaaacgtgctgatcctgggctcggggtggggagctattagctttttaaagcacattgacaccaagaagtacaacgtttccatcatcagccctagaagctatttcctgtttacgcccttgttaccctctgcaccagttgggacagtagacgaaaagtccattatcgagcccatcgtgaattttgctctcaagaaaaaggggaacgtcacctactatgaggccgaagccacctctatcaaccccgacaggaacaccgttaccatcaagtcattatctgccgtgagccagctgtaccagcccgagaaccatctaggcctgcatcaggcagaacccgctgagattaagtacgattatttaatcagtgctgtaggcgcggagcctaacacatttggtattcctggcgtcaccgattacggccatttcctggaggaaattcccaactctttggaaatccggagaacctttgccgccaatctagaaaaggctaacctgctgccaaagggcgatcccgaaagaagaaggctactgtccattgtcgtcgttggtggagggcccactggtgtagaggccgctggtgaactgcaggattacgttcaccaggacctgcggaagttcttccccgcactggccgaggaagtgcaaattcacttggtcgaagctctgcccatcgttctgaacatgtttgagaaggagcttagctcatacgcgcaaagccatctggaaaacacttcgatcaaagtacatctgagaacggctgtcgccaaagttgaagaaaagcaattgttggcaaagaccaaacacgaagacggtaaaattaccgaggaaaccattccatacggcaccctgatttgggccacgggtaacaaggcaagacccgtaatcaccgaccttttcaagaaaatccctgagcaaaacagctccaagagaggactggccgtgaatgactttttgcaggtggagggcagcaacaacattttcgccatcggtgacaatgcatttgctgggttgccaccaaccgcccaggtagcgcaccaggaggccgaatatttggccaagaatttcgacaaaatggcccaaatcccaaatttccagaagaatctatcttcaagaaaggataaaattgatctcctgttcgaggaaaacaacttcaaacccttcaaatacaacgatttaggtgccttagcatacctgggatccgaaagagccattgcaaccatccgttccggtaagagaacattttacaccggcggtggcctgatgaccttctacttatggagaatcttgtacttgagcatgattctatctgcaagatcgagattaaaggtgtttttcgactggattaaattagcatttttcaaaagagacttcttcaaaggcttatag

SEQ ID NO: 377 - DNA, 1542 bp, Artificial Sequence
  source: /note="Description of Artificial Sequence: Synthetic polynucleotide"
atgctatcgaagaatttgtatagtaacaagcggttgctcaccagcacgaacaccctagtgagattcgcctccaccagatccacaggggtcgaaaactccggagcaggccccacatctttcaagaccatgaaagtcattgaccctcagcacagcgacaaaccaaacgtgctgatactgggctcgggctggggcgctattagctttctgaagcacattgacaccaagaagtacaacgtttccatcatctctcctagaagctatttcttacacacgcctttgctgccttctgccccagtggggacagtagacgaaaagtccattattgagcccatcgttaactttgctctcaagaaaaaggggaacgttacctactacgaggcagaagccacctctatcaatcccgacaggaacaccgttaccataaaaagcctgtctgccgttagccagctgtaccaacctgaaaaccatctagggctgcaccaagcagaacccgctgaaattaagtacgattatctgatcagtgctgtgggtgcggaacctaacacctttggtattcccggggtcactgattacggccatttcctgaaggaaattcccaactctctggaaatacggagaacctttgccgccaatctagaagaggctaacctgttgcctaagggcgatcccgaaagaagaagactgctgtccattgtcgtcgttggtggtgggcctactggcgtagaagccgctggcgaactgcaggactatgttcaccaggacctgagaaagtttttccccgcattggccgaggaagtccaaattcacttggtcgaagccctgcccatcgttttgaatatgtttgagaagaagcttagcagctacgcgcaaagccatctggaaaacacttcgatcaaagtacatctgagaaccgccgtcgccaaagttgaagaaaagcaattgctggcaaagaccaaacacgaagacggtaaaataaccgaggaaactattccatacggtaccttgatttgggccacgggtaacaaggcaagaccggtgatcaccgacctgttcaagaagatccccgagcaaaactcgagcaagagaggattggcagtgaatgactttctgcaggtgaaaggcagcaacaacattttcgccatcggtgacaatgcctttgccggcttgccaccaaccgcccaggtagcccaccaagaggccgagtatttggccaagaatttcgacaaaatggctcaaatacccaatttccagaagaacctatcttcaagaaaggataaaattgacctgctgttcgaggagaacaactttaaacccttcaagtacaacgatctgggtgccttagcctacctgggatccgaaagagccattgcaaccataagaagcggcaagcggacattttacaccggcggaggcttaatgaccttctacctgtggcagattttgtacatgtccatgattctatctgcccgctcgagattaaaggtctttttcgactggattaaattagcctttttcaaaagagacttttttaaaggattatga

SEQ ID NO: 378 - DNA, 1542 bp, Artificial Sequence
  source: /note="Description of Artificial Sequence: Synthetic polynucleotide"
atgctatcgaagaatttgtatagcaacaagaggttgctgaccagcacgaatacgctagtcagattcgcttccaccagatccacaggggtggaaaactccggagcaggtcctacatcttttaagaccatgaaagtcattgacccccagcacagcgacaaaccaaacgtgctgatactgggttcggggtggggagccatttcgtttttaaagcacattgacaccaagaagtacaacgtttccatcatctctcctagaaagtatttcctgttcacgcccttgttaccctctgcaccagtggggacagtagacgaaaagtcaattattgagcccatcgttaatttcgccctgaagaaaaaggggaacgtcacctactacgaggcagaagccaccagcatcaatcccgacaggaataccgttaccataaagtcattaagcgccgttagccagctgtaccaacctgagaaccatctaggcctgcatcaagcagaacctgctgaaattaagtacgactacttaatcagcgctgtgggtgccgaacctaacacctttggaattcccggcgtcactgattacggccacttcctgaaggaaattcccaactctttggaaatacggagaacttttgccgccaatctagaaaaggctaacttattgccaaagggtgatcccgaaagaagaaggctactgtccattgtcgtggttggtggtgggcctactggtgtagaggccgctggcgaactacaggactacgttcaccaggacctgcggaagttcttccccgcattggccgaagaagtgcaaattcacttggtggaagctctgcccatcgttctgaacatgtttgagaaagagctttcatcatacgcgcagagccatctggaaaacacttcgatcaaagtacatctgagaaccgctgtcgccaaagttgaagaaaagcaactgttggccaagaccaaacacgaggacggtaagataaccgaagaaactatcccatacggtaccctgatttgggccacgggcaacaaggccagaccggtgatcactgaccttttcaagaagattcccgagcaaaactcgagcaagcggggactggccgtgaatgactttttgcaggtggagggcagcaacaacattttcgccattggtgacaacgcctttgccgggttgccacctacagcccaagtagcccaccaggaggccgaatacatcgccaagaattttgataagatggctcagataccaaatttccaaaagaacctatcttcaagaaaggataagattgacctcttgttcgaggaaaacaacttcaaacctttcaagtacaacgatctgggtgccctggcctacctgggatccgaaagagccattgcaaccatccgttccggtaagcggaccttttacaccggtggtggcttaatgaccttctacttatggcggattttgtacttgtccatgattctgtctgccagaagcagattaaaggtgttcttcgactggattaagctggcattcttcaaaagagactttttcaaaggactgtag

SEQ ID NO: 379 - DNA, 1542 bp, Artificial Sequence
  source: /note="Description of Artificial Sequence: Synthetic polynucleotide"
atgctatcgaagaacctgtatagtaacaagaggttgctgacctcgacgaatacgctcgtcagattcgcctccaccagatccacaggggtggaaaactccggagcaggtcccacaagctttaagaccatgaaggtcattgaccctcagcacagcgacaaaccaaacgtgctgatcctgggttcgggctggggagctatttcgtttctgaagcacattgacaccaagaagtacaacgtttccatcatcagccctagaaagtacttcctgcacacgcctttgctgccctctgcccctgttgggacagtagacgaaaagtccattatcgagcccatcgttaattttgctctgaagaaaaagggcaacgttacctactacgaggccgaagccaccagcatcaaccccgacaggaacaccgtgaccatcaaatcattatctgccgtttcccagctataccagcccgaaaaccatctggggctgcatcaagccgaacctgccgaaattaagtacgattacctgatcagtgccgtaggtgccgaacctaacacatttggtatccccggggtcactgattacggccatttcctgaaagagattcccaactctttggaaatacggagaacctttgccgccaatctagagaaggctaacctgctgcctaagggtgatcccgaaagaagaaggctactgtccattgtcgtggttggtggtgggcccactggtgtggaggccgctggtgagctacaggattatgttcaccaggacctgcggaagtttctccccgccctggccgaagaagtccagattcacttggtcgaagccctgcccatcgtgctgaatatgttcgagaaaaagctttcaagctacgcccaatcacatctggaaaacacttcgatcaaagtacatctgagaacggctgtcgccaaagtggaagagaagcaattgttggcaaagaccaaacacgaagacggtaaaattaccgaagaaaccatcccatacggcactctgatttgggccacgggtaacaaggcaagaccggtaatcaccgacctgttcaagaaaattcctgagcaaaacagctccaagagaggactggcagtgaatgactttctgcaggtgaaaggcagcaacaacattttcgccattggtgacaatgcctttagcggcttgccaccaaccgcccaggtagcgcaccaagaggccgagtatatcgccaagaatttcgataaaatggctcaaatacccaatttccaaaagaatctatcttccagaaaggataagattgacctcttgttcgaggagaacaacttcaaacctttcaagtacaacgatttaggtgccttagcatacctgggaagcgaaagggccattgccaccatccgttccggcaagagaaccttttacaccggtggtggcttaatgaccttctacttatggagaatcctgtacttgtccatgattctatctgcaagatcgagattaaaggtgtttttcgactggattaagttagcctttttcaagagagacttttttgagggattatag

SEQ ID NO: 380 - DNA, 1542 bp, Artificial Sequence
  source: /note="Description of Artificial Sequence: Synthetic polynucleotide"
atgctgtcgaagaacctgtatagcaacaagaggttgctgacctcgacgaatacgatggtgagattcgcttccaccagatccacaggggtggaaaactccggagcaggtcccacatcttttaagaccatgaaggtcattgaccctcagcacagcgacaagccaaacgtgctgatactgggttctgggtggggagctatttcgtttttaaagcacattgacaccaagaagtacaacgtttccatcatctctcccagaagctatttcctgtttacgcccctgatgccttctgccccagttgggacagtagacgaaaagtcaattatcgagcccatcgttaattttgctctcaagaaaaaggggaacgttacctactatgaggcagaagccacctctatcaatcccgaccggaacaccgttaccatcaaatcactgtctgccgtttcccagctgtaccagcctgaaaaccacctagggatgcatcaagccgaacccgctgaaattaagtacgattacttaatcagtgctgtgggcgccgaacctaacacatttggtatccctggcgtcaccgactacggtcacttcctgaaggaaattcccaacagcttggaaatacggcggacttttgccgccaacctagagaaggctaacctgttgccaaagggtgaccccgaacggagaaggctgctgtccattgtcgtggttggtggagggcctactggcgtggaggccgctggcgagctacaggactatgtgcaccaggacctgagaaagtttctccctgcattggccgaagaagtgcaaattcacttggtcgaagccctgcccatcgttctgaatatgtttgagaaaaagctgtcaagctacgcccagtcacacttagaaaacacttcgatcaaagtacatctgagaacggctgtcgccaaggttgaagaaaagcagttgttggcaaagaccaagcacgaagacggtaaaataaccgaagaaactatcccatacggtaccctgatttgggccacgggtaacaaggcaagaccggtaatcaccgaccttttcaagaaaattcccgagcaaaacagcagcaagagaggattggcagtgaacgactttttgcaggtcaaaggcagcaacaacattttcgccatcggtgacaatgcatttagcgggttgcctccaaccgcccaagtggcgcaccaagaagccgaatatttggccaagaattttgataaaatggcccaaataccaaatttccagaagaatctatcttcaagaaaggataaaattgacctcttgttcgaggaaaacaacttcaagcccttcaaatacaacgacttaggtgccttagcctacctgggcagcgaaagggccattgcaaccatacgttccggtaagcggacattttacaccggcggaggcctgatgaccttctacctgtggcggatcttgtacatgtccatgattctaagcgcaagaagcagattaaaggtgttcttcgactggattaagttagcatttttcaagagagacttttttaaaggattatag

SEQ ID NO: 381 - DNA, 1542 bp, Artificial Sequence
  source: /note="Description of Artificial Sequence: Synthetic polynucleotide"
atgctgagcaagaatttgtatagtaacaagaggctgctcacctcgaccaatacgatggtccgcttcgcctccaccagatccacaggcgtggaaaactccggagctggtcctaccagcttcaagaccatgaaagtcattgaccctcagcacagcgacaaacccaacgtgctgatactgggttcggggtggggagccatctcgtttttaaagcacatcgacaccaagaagtacaacgtctccatcatctctcctagaaagtatttcttattcacgcctttgatgccttctgcacctgttgggacagtagacgaaaagtcaatcattgagcccatcgttaacttcgctctcaagaaaaagggcaacgttacctactatgaggcagaagccacctctatcaaccccgacaggaacaccgttaccataaaatcattatctgccgttagccagctataccaacctgaaaaccatctagggctgcaccaagccgaacctgccgaaattaagtacgattatctgatcagtgctgtgggtgccgagcctaacacatttggtattcccggcgtgaccgattacggtcatttcctgaaggaaattcccaactctctggaaatcagaagaacctttgccgccaatctggagaaggccaacttattgcctaagggcgatcccgaacggagaagactactgtccattgtggtggtgggtggagggcccactggtgtagaggccgctggtgagctacaggattacgtgcaccaggacctgagaaagtttctgcctgcattggccgaagaagtccaaattcacctggtcgaagctctgcccatcgttttgaatatgtttgagaagaagctttcaagctacgcgcaatcacatttagaaaacacttcgatcaaggtgcatctgagaacggctgtcgccaaagttgaagagaagcaactgttggcaaagaccaagcacgaggacggtaaaataaccgaagaaactattccatacggtactttgatttgggccacgggtaacaaggcaagaccggtgatcactgacctgttcaagaagatccccgagcaaaactcgtccaagagaggattggcagtgaacgactttttgcaggtggagggcagcaacaacattttcgccattggtgacaatgcatttgctggcctgccaccaaccgcccaagtagcgcaccaggaagccgagtatatcgccaagaactttgacaaaatggctcaaataccaaatttccaaaagaatctgtcttcacggaaggataaaatcgacctgctgttcgaggaaaacaactttaaacctttcaagtacaacgacttaggcgccttagcatacctgggcagcgaaagggccattgcaaccatcagaagcggtaagagaacattttacaccggtggaggcctgatgaccttctacctgtggcggatcttgtacttgagcatgatcctatctgcaagatcgagattaaaggtctttttcgactggattaaattagcctttttcaagagagacttcttcaaaggattatag

SEQ ID NO: 382 - DNA, 1542 bp, Artificial Sequence
  source: /note="Description of Artificial Sequence: Synthetic polynucleotide"
atgctgtcgaagaatttgtatagtaacaagcggctgctcacctcgaccaacacgctcgtccgcttcgcctccaccagatccacaggcgtcgaaaacagcggggcaggccccacaagcttcaagaccatgaaagtcatcgacccccagcacagcgacaaacccaacgtgctgatactgggctctgggtggggcgctattagctttctgaagcacatcgacaccaagaagtacaacgtctccatcatcagccccagaagctatttcctgtttacgcccctgttacccagcgcccctgtgggaacagtggacgagaagtcaattatcgagcccatcgttaattttgccctcaagaaaaagggcaacgtcacctactacgaggcagaagccacctctatcaatcccgacaggaacaccgtgaccataaagagcttaagcgccgtgagccagctgtaccaacctgagaaccacctggggctgcaccaggcagaacctgctgaaattaagtacgactacttaatcagcgccgtgggtgccgaacccaacacctttggaatccctggggtcactgactacggccacttcctgaaggaaattcccaactctttggaaatcagaagaactttcgccgccaacctagaaaaggccaacttattgcctaagggcgatcccgagagaagaaggctgctgagcattgtggtcgttggcggaggccccactggcgtagaggccgctggcgagctgcaggactacgtgcaccaggacctgagaaagtttctgcccgccttggccgaagaagtgcagattcacctggtggaagctctgcccatcgttctgaacatgttcgagaaggagcttagcagctacgcgcagagccatttagaaaacacttccatcaaagtacacctgagaaccgctgtggccaaggtggaagaaaagcagctgctggccaagaccaaacacgaggacggcaagataaccgaggaaactattccctacggcactttgatttgggccacgggcaacaaggcaagaccggtgatcactgaccttttcaagaagatccctgagcaaaacagcagcaagagaggcttggccgtgaacgactttctgcaggtgaaaggcagcaacaacatcttcgccatcggtgacaatgcatttgccggcttgcctccaacagcccaggtggcccaccaggaagccgaatacatcgccaagaacttcgataagatggcccagatccccaatttccagaagaacctatcctccagaaaggataagatcgacctgctgttcgaggagaacaactttaagcctttcaaatacaacgacttaggcgccctggcctacctgggcagcgaaagggccattgccaccatccgtagcggcaagcggacattctacaccggcggaggcctgatgaccttctacctgtggcggattctgtacatgtccatgattctaagcgcccgctcgagactgaaggtgttcttcgactggatcaagatggccttcttcaagagggacttcttcgagggcctgtag

SEQ ID NO: 383 - DNA, 1542 bp, Artificial Sequence
  source: /note="Description of Artificial Sequence: Synthetic polynucleotide"
atgctgtcgaagaatctgtacagcaacaagcggttgctgaccagcacgaatacgctcgtgagattcgccagcaccagatccaccggggtcgaaaacagcggggcaggccctaccagctttaagaccatgaaggtcattgacccccagcacagcgacaagcccaacgtgctgatactgggttctggctggggcgctatcagctttctgaagcacatcgacaccaagaagtacaacgtttccatcatctctcccagaagctacttcctgtttacccccttgctgcccagcgccccagttgggacagtagacgagaagtccatcatcgagcccatcgtgaattttgccctgaagaaaaaggggaacgtcacctactatgaggcagaggccaccagcatcaatcccgaccggaacaccgtgaccatcaagaacttatctgccgtgagccagctgtaccaacctgaaaaccacctgggcctgcaccaggccgaacctgccgaaattaagtacgactacttaatcagcgctgtgggtgccgagcctaacacatttggaatccccggggtgactgactacggtcatttcctgaaagaaatccccaactctttggaaataagaagaactttcgccgccaacctggaaaaggctaacttactgccaaagggcgaccccgaacggagaaggctgctgagcatcgtcgtggtgggcggtggccctacaggtgtggaagccgctggcgaactgcaggattatgttcaccaggacctgcggaagtttttccccgcactggccgaggaagtccagattcacctggtcgaagccctgcccatcgttttgaacatgttcgagaaggagctgagcagctacgcccaaagccacctggaaaacacctccatcaaggtgcacctgagaaccgccgtcgccaaggtggaagagaagcaactgttggccaagaccaaacacgaagacggcaaaataaccgaagaaactattccatacggtaccctgatttgggccacgggtaacaaggcaagacccgtgatcactgacctgttcaagaagattcccgagcagaactcgagcaagcggggcctggcagtgaacgacttcctgcaggtcaaaggcagcaacaacattttcgccattggtgacaacgcctttgccggcttgccacctacagcccaggtagcgcaccaggaagccgaatatctggccaagaactttgacaaaatggcccagataccaaatttccagaagaatctatcctcccggaaggataaaattgatctgctgttcgaggaaaacaacttcaagcccttcaagtacaacgacctgggcgccctggcctacctgggcagcgaaagagccattgcaaccataagaagcggcaagcggaccttctacaccggcggaggcctgatgaccttctacctgtggagaattttgtacctgtccatgatcctgagcgccagaagcagactgaaggtgttcttcgactggatcaaaatggcatttttcaaaagggacttctttgagggactgtga

SEQ ID NO: 384 - DNA, 1542 bp, Artificial Sequence
  source: /note="Description of Artificial Sequence: Synthetic polynucleotide"
atgctgagcaagaacttgtatagtaacaagaggctgctgaccagcaccaacacgatggtcagattcgcctccaccagatccaccggcgtcgaaaactccggagcaggccccaccagcttcaagaccatgaaggtcatcgacccccagcacagcgacaaaccaaacgtgctgatactgggttcggggtggggagctattagctttctgaagcacattgacaccaagaagtacaacgtcagcatcatcagccccagaagctatttcctgcacacccccttgctgcccagcgccccagtgggaacagtggacgagaagtccatcattgagcccatcgttaatttcgctctcaagaaaaaggggaacgttacctactacgaggccgaggccaccagcatcaaccccgaccggaataccgttaccataaaaaacttaagcgccgtgtcccagctgtaccagcccgaaaaccacctggggatgcaccaggcagagcccgccgaaattaagtacgattacctgatcagtgccgtaggtgcggaacccaacacatttggaatccccggcgtgaccgattacggccatttcctgaaagagatccccaactctctggaaatacggcggacttttgccgccaacctggaaaaggccaacctgctgcctaagggtgatcccgagcggagaaggctactgtccatcgtggtcgtgggcggaggccctacaggcgtagaagccgctggcgagctgcaggattacgtgcaccaggacctgcggaagttcctgcccgcattggccgaggaagtccagattcacctggtcgaagccctgcccatcgttctgaacatgttcgagaagaagctttcaagctacgcccaatcacacttagaaaacacctccatcaaggtacacctgagaaccgctgtggccaaggtggaagaaaagcagctgctggccaagaccaaacacgaagacggtaagataaccgaagaaaccattccatacggtactttgatttgggccacgggtaacaaggccagaccggtgatcaccgaccttttcaagaagatccccgagcaaaacagctccaagagaggcctggccgtgaacgactttttgcaggtcgagggcagcaacaacatcttcgccattggcgacaatgcatttgccggcctgccacctacagcccaggtagcgcaccaagaagccgaatacttggccaagaacttcgataaaatggctcagatccccaatttccagaagaatctgtcctcaagaaaggataagattgacctcttgttcgaggaaaacaactttaagcctttcaagtacaacgatctgggcgccttagcctacctgggatccgaaagggccattgcaaccatcagaagcggcaagcggaccttctacaccggcggtggcctgatgaccttctacttatggagaatcctgtacctgagcatgatcctgagcgcccgctcgagattaaaggtcttcttcgactggatcaagctggccttcttcaaaagggacttcttcaagggactgtag

SEQ ID NO: 385 - DNA, 1542 bp, Artificial Sequence
  source: /note="Description of Artificial Sequence: Synthetic polynucleotide"
atgctgagcaagaacctgtacagtaacaagcggctgctgacctcgaccaataccctcgtcagattcgcttccaccagatccacaggcgtcgaaaactccggagcaggccccacatcttttaagaccatgaaggtcatcgaccctcagcacagcgacaagccaaacgtgctgatcctgggctctggctggggcgccattagctttctgaagcacattgacaccaagaagtacaacgtcagcatcatctctcccagaagctatttcttatttacccccctgatgcccagcgcccctgttgggaccgtggacgaaaagtccatcatcgagcccatcgttaactttgccctcaagaaaaagggcaacgttacctactatgaggcagaagccacctctatcaaccccgaccggaacaccgtgaccatcaaaaacctgagcgccgtgtcccagctgtaccagcctgagaaccacctggggctgcaccaagcagagcctgccgagattaagtacgactacttaatcagtgctgtgggtgccgaacccaacacctttggtatccccggcgtcaccgattacggtcacttcttcaaggaaatccccaacagcttggaaatcagacggacctttgccgccaatctggaaaaggccaacctgctgcctaagggtgatcccgagagaagaagactgctgagcattgtcgtcgtgggtggaggccccacaggcgtggaggctgctggcgaactacaggactacgtgcaccaggacctgcggaagtttctgcccgccctggccgaagaagtgcagattcacttggtggaagctctgcccatcgtgttgaatatgttcgagaaagagcttagcagctacgcgcaaagccacttagaaaacacctccatcaaggtgcacctgagaaccgccgtggccaaggttgaagaaaagcaactgctggcaaagaccaaacacgaggacggtaagattaccgaagaaactatcccctacggcactctgatttgggccaccggtaacaaggcaagacccgtaatcaccgaccttttcaagaagatccctgagcagaacagcagcaagcggggcctggccgtgaacgacttcttgcaggtgaaaggcagcaacaacattttcgccatcggtgacaacgcctttgccgggctgccaccaacagcccaagtagcccaccaagaagccgagtatctggccaagaattttgacaagatggcccagatcccaaatttccaaaagaacctgtcctcaagaaaggataagattgacctgttgttcgaggagaacaacttcaagcctttcaagtacaacgacttaggcgccctggcctacctgggcagcgaaagggccattgccaccatcagaagcggcaagagaaccttttacaccggtggaggcttaatgaccttctacctgtggcggatcctgtacttgagcatgattctaagcgcccgcagcagactgaaggtgttcttcgactggattaaaatggcatttttcaaaagggactttttcaagggattatga

SEQ ID NO: 386 - DNA, 1542 bp, Artificial Sequence
  source: /note="Description of Artificial Sequence: Synthetic polynucleotide"
atgctgtcgaagaatctgtacagcaaccggaggttgctcacctcgaccaacaccctcgtccgcttcgccagcaccagatccaccggggtcgaaaacagcggggctggccccacaagctttaagaccatgaaggtcattgaccctcagcacagcgacaagccaaacgtgctgatactgggttcgggctggggagccattagctttttaaagcacatcgacaccaagaagtacaacgttagcatcatctctcccagaaagtacttcctgtttacgcccttgttacctagcgcccctgttggaacagtggacgagaagtcaatcattgagcccatcgtgaatttcgctctgaagaaaaagggcaacgtcacctactacgaggcagaggccacctctatcaaccccgaccggaacaccgtgaccatcaaaagcttaagcgccgtgtcccagctgtaccaacccgagaaccacctaggcctgcaccaagccgaacccgccgagattaagtacgattatttaatcagtgccgtgggtgcggaacccaacacatttggaatccctggggtgaccgactacggtcatttcctggaggagattcccaacagcctggaaatccggcggaccttcgccgccaacctggaaaaggctaacctgctgcctaagggcgaccccgagcggagaaggctgctgtccatcgtcgtcgtgggcggtggccctactggcgtagaagctgctggcgagctgcaggactatgtgcaccaggacctgagaaagttcttccccgcactggccgaggaagtccagattcacttggtggaagctctgcccatcgtgctgaatatgtttgagaaaaagctgagctcatacgcccagtcacatttagaaaacacctccatcaaagtacatctgagaaccgccgtggccaaggtggaagagaagcagctgttggcaaagaccaaacacgaggacggtaagataaccgaagaaactatcccctacggtaccttgatttgggccaccggcaacaaggcaagacccgtaatcaccgaccttttcaagaaaattcccgagcagaactcgagcaagagaggcctggccgtgaatgacttcctgcaggtgaaaggcagcaacaacatcttcgccatcggtgacaacgcatttgctggcctgccacctacagcccaagtagcccaccaagaggccgagtacctggccaagaactttgataaaatggcccagatccccaatttccagaagaacctgtcctcccggaaggataagatcgacctcctgttcgaggagaacaacttcaagcccttcaagtacaacgacttaggcgccctggcctacctgggaagcgaaagagccattgccaccatacgtagcggcaagagaaccttttacaccggtggtggcctgatgaccttctacctgtggcggattttgtacctgtccatgatcctaagcgcacgcagcagattaaaggtgttcttcgactggattaaactggcctttttcaagagggactttttcaaaggattatga

SEQ ID NO: 387 - DNA, 1542 bp, Artificial Sequence
  source: /note="Description of Artificial Sequence: Synthetic polynucleotide"
atgctatcgaagaacttgtacagtaaccggcggctgctcacctcgaccaataccctagtcagattcgcttccaccagatccacaggggtggaaaactccggggctggccctacctcttttaagaccatgaaggtcatcgacccccagcacagcgacaaacccaacgtgctgatcctgggctctggctggggcgccattagctttctgaagcacatcgacaccaagaagtacaacgtttccatcatcagccccagaagctatttcctgtttacccccctgatgcccagcgccccagttgggaccgtggacgagaagtcaatcatcgagcccatcgttaacttcgccctgaagaaaaagggcaacgtcacctactacgaggcagaggccaccagcatcaaccccgacaggaataccgtgaccatcaagtcattatctgccgtgtcccagctgtaccagcccgagaaccatctagggctgcaccaggcagagcccgccgaaattaagtacgattacctgatcagtgctgtgggcgcggaacccaacacatttggtatccctggcgtgaccgactacggtcacttcctgaaagaaatccccaactctttggaaataagacggaccttcgccgccaacctggaagaggctaacctgctgcctaagggcgatcccgaaagaagaagactgctgagcatcgtggtcgttggcggtggccctactggtgtagaagctgctggcgagctacaggattatgttcaccaggacctgcggaagtttctgcccgcattggccgaagaagtgcagattcacttggtggaagccctgcccatcgtgctgaacatgtttgagaagaagctgagctcatacgcgcagagccatttagaaaacacctccatcaaagtgcatctgagaaccgccgtggccaaggtggaagagaagcagctgctggccaagaccaagcacgaagacggcaaaattaccgaggaaaccatcccctacggtaccttgatttgggccacgggtaacaaggccagacccgtgatcaccgacctgttcaagaaaattcctgagcagaactcgagcaagagaggcctggcagtgaacgacttcctgcaggtgaaaggcagcaacaacatcttcgccatcggtgacaatgcctttagcggcctgcctcctacagcccaggtggcccaccaggaagccgaatatttggccaagaatttcgataagatggcccagatacccaatttccaaaagaacctatcctcccggaaggataagatcgacctgttgttcgaggaaaacaacttcaagcctttcaaatacaacgacctgggcgccttagcctacctgggaagcgaaagggccattgccaccatacgtagcggcaagcggaccttctacaccggtggaggcttaatgaccttctacctgtggcggatcttgtacttgagcatgatcctgtctgcaagaagcagattaaaggtcttcttcgactggatcaaactggcatttttcaaaagggacttttttgagggcctgtga

SEQ ID NO: 388 - DNA, 1542 bp, Artificial Sequence
  source: /note="Description of Artificial Sequence: Synthetic polynucleotide"
atgctgagcaagaatttgtacagcaacaagcggttgctcaccagcacgaacacgctagtcagattcgctagcaccagatccaccggcgtggaaaacagcggggctggtcctacctctttcaagaccatgaaagtcatcgacccccagcacagcgacaaacccaacgtgctgatcctgggttcgggctggggcgccatcagctttctgaagcacatcgacaccaagaagtacaacgtctccatcatcagccccagaagctacttcttacacacccccttgctgcccagcgccccagtgggaaccgtagacgaaaagtcaattatcgagcccatcgtgaatttcgctctgaagaaaaagggcaacgtcacctactatgaggcagaagccaccagcatcaatcccgaccggaataccgttaccatcaagagcctgtctgccgtgagccagctgtaccagcctgaaaaccacctaggcctgcaccaggcagagcccgctgaaattaagtacgattatttaatcagcgccgtgggcgcggagcccaacacctttggaatccccggggtgaccgactacggccacttcttcaaagagattcccaactctttggaaatccggagaactttcgccgccaacctagagaaggctaacttattgcctaagggtgaccccgagcggagaagactactgagcattgtggtcgtgggcggaggccccactggcgtagaagctgctggcgaactgcaggattacgtgcaccaggacctgcggaagtttttccccgccctggccgaggaagtccagattcacctggtcgaagccctgcccatcgttctgaacatgttcgagaaggagctgtcatcatacgcgcagtcacatttagaaaacacctccatcaaagtacatctgagaaccgctgtggccaaagttgaagagaagcagctgttggcaaagaccaagcacgaggacggcaaaattaccgaggaaaccatcccatacggcactctgatttgggccacgggcaacaaggccagacccgtaatcactgacctgttcaagaagattcctgagcaaaactcgtccaagcggggactggccgtgaatgacttcctgcaggtgaaaggcagcaacaacattttcgccattggtgacaacgcctttagcggcctgcctccaacagcccaggtagcccaccaggaagccgaatatctggccaagaacttcgacaagatggcccagatcccaaatttccagaagaatctgtcttcaagaaaggataaaatcgatctcttgttcgaggaaaacaacttcaagcctttcaagtacaacgacttaggcgccctggcatacctgggctccgaaagggccattgccaccatcagaagcggcaagcggaccttctacaccggtggaggcctgatgaccttctacctgtggcggattctgtacctgagcatgatcctgagcgcacgcagcagactgaaggtgttcttcgactggattaagctggcattcttcaagagagacttctttaaaggactgtag

SEQ ID NO: 389 - DNA, 1542 bp, Artificial Sequence
  source: /note="Description of Artificial Sequence: Synthetic polynucleotide"
atgctgagcaagaacttgtacagcaaccggcggctgctgacctcgaccaatacgatggtgcgcttcgccagcaccagatccaccggcgtggaaaactccggggctggccctaccagctttaagaccatgaaggtcatcgaccctcagcacagcgacaagcccaacgtgctgatcctgggttcgggctggggagctatcagctttctgaagcacatcgacaccaagaagtacaacgtctccatcatctctcccagaagctacttcttatttacccccctgatgccctctgccccagtgggaaccgtggacgagaagtcaattatcgagcccatcgtgaactttgctctcaagaaaaaggggaacgtcacctactacgaggccgaggccaccagcatcaatcccgaccggaacaccgttaccataaagtcactgtctgccgttagccagctgtaccagcccgaaaaccacctggggctgcatcaagccgagcctgccgagattaagtacgattacctgatcagcgccgtaggtgcggagcccaacacatttggaattcccggggtgaccgactacggtcacttcctgaaagagattcccaacagcctggaaatacggagaactttcgccgccaatctagaaaaggctaacttactgcctaagggtgaccccgagagaagaaggctgctgtccatcgtcgtcgtgggcggaggccctactggtgtagaggctgctggtgaactacaggattacgtgcaccaggacctgagaaagttcttccccgccttggccgaagaagtccagattcacctggtggaagctctgcccatcgtgctgaacatgtttgagaaaaagctgagcagctacgcccaatcacatttagaaaacacctccatcaaggtgcacctgagaaccgccgtcgccaaggtggaagaaaagcaattgttggcaaagaccaaacacgaggacggcaagattaccgaagaaaccattccatacggcaccttgatttgggccaccggcaacaaggccagacccgtaatcaccgacctgttcaagaagattcccgagcaaaacagctccaagcggggcctggcagtgaacgactttttgcaggtgaaaggcagcaacaacatcttcgccatcggcgacaacgcctttgccggcttgcctccaacagcccaagtggcccaccaagaggccgagtacttggccaagaacttcgataaaatggctcaaatcccaaatttccagaagaacctgtcttcacggaaggataaaatcgatctgctgttcgaggagaacaactttaagcccttcaagtacaacgacctgggtgccctggcctacctgggctccgaaagagccattgccaccatcagatccggcaagagaaccttctacaccggcggtggcctgatgaccttctacttatggcggatcttgtacctgagcatgatcctgtctgcccgcagcagattaaaggtgttcttcgactggatcaaaatggcctttttcaaaagagacttctttaagggcctgtag

SEQ ID NO: 390 - DNA, 1542 bp, Artificial Sequence
  source: /note="Description of Artificial Sequence: Synthetic polynucleotide"
atgctgagcaagaatctgtacagcaaccggcggctgctgacctcgaccaataccctcgtgcgcttcgccagcaccagatccaccggcgtcgaaaacagcggagctggccccaccagcttcaagaccatgaaggtcatcgacccccagcacagcgacaaacccaacgtgctgatactgggttctggctggggcgccatctcgtttctgaagcacattgacaccaagaagtacaacgttagcatcatcagccccagaaagtacttcctgttcacgcctctgatgcccagcgcacctgtgggaaccgtagacgagaagtcaattatcgagcccatcgttaacttcgccctgaagaaaaagggcaacgtcacctactatgaggccgaagccacctctatcaaccccgacaggaataccgtgaccatcaagtcattatctgccgttagccagctataccagcctgagaaccacctgggcctgcaccaggccgagcccgctgagattaagtacgactacctgatcagtgctgtaggtgccgagcctaacacctttggaattcccggggtgactgattacggtcacttcctgaaagagatccccaacagcctggaaatacggcggaccttcgccgccaacctggagaaggctaacctgctgcctaagggtgaccccgaaagaagaagactgctgtccatcgtcgtggtgggtggtggccccacaggtgtggaggccgctggtgagctgcaggattacgttcaccaggacctgagaaagtttctgcccgccttggccgaagaagtccaaattcacctggtggaagctctgcccatcgttctgaacatgttcgagaagaagctgagctcatacgcgcaatcacatctggaaaacacttccatcaaggtacacctgagaaccgccgtggccaaagtggaagaaaagcagctgttggccaagaccaagcacgaggacggtaagattaccgaggaaactattccctacggcaccttgatttgggccaccggtaacaaggcaagacccgtgatcaccgaccttttcaagaaaatccccgagcagaactcgagcaagagaggcctggccgtgaacgactttttgcaggtcaaaggcagcaacaacattttcgccatcggcgacaatgcatttgccggcttgcctccaaccgcccaggtggcccaccaggaagccgaatacctggccaagaacttcgataagatggctcagatcccaaatttccagaagaatctgtcttcccggaaggataaaatcgacctcttgttcgaggaaaacaactttaagcctttcaaatacaacgacctgggcgccttagcctacctgggaagcgaaagggccattgcaaccatccgttccggtaagagaacattttacaccggtggaggcctgatgaccttctacctgtggcagatcttgtacctgtccatgattctgtctgcccgcagcagactgaaggtgtttttcgactggatcaaaatggcattcttcaagagggactttttcaagggactgtga

SEQ ID NO: 391 - DNA, 1542 bp, Artificial Sequence
  source: /note="Description of Artificial Sequence: Synthetic polynucleotide"
atgctatcgaagaacttgtacagtaacaagcggctgctgacctcgaccaacaccatggtccgcttcgccagcaccagatccacaggcgtggaaaacagcggagctggccccaccagcttcaagaccatgaaagtcatcgacccccagcacagcgacaagccaaacgtgctgatcctgggctcggggtggggcgctattagctttttaaagcacattgacaccaagaagtacaacgtcagcatcatctctcccagaagctatttcttattcacgcccctgttaccttctgcaccagtgggaaccgtagacgaaaagtcaatcatcgagcccatcgtgaacttcgccctgaagaaaaaggggaacgttacctactacgaggccgaggccaccagcatcaaccccgacaggaacaccgtgaccatcaaaagcttatctgccgtttcccagctataccaacccgaaaaccatctgggcctgcaccaggcagagcctgccgagattaagtacgactatctgatcagcgccgtgggcgccgaacccaacacctttggaatccccggcgtcactgattacggtcacttcctggaggagatccccaactctctggaaatcagacggaccttcgccgccaatctggaagaggccaacttactgccaaagggcgaccccgagcggagaaggctgctgagcattgtggtggttggcggtggccccacaggcgtggaagctgctggtgagctacaggactatgtgcaccaggacctgcggaagtttttccccgccctggccgaggaagtccaaattcacctggtggaagctctgcccatcgtgttgaatatgttcgagaagaagctttcatcatacgcgcagtcacacctggaaaacacctccatcaaggtacacctgagaaccgctgtcgccaaggttgaagagaagcaactgctggcaaagaccaaacacgaagacggcaagataaccgaggaaaccattccctacggtactctgatttgggccaccggcaacaaggccagacccgtaatcactgaccttttcaagaagatccctgagcaaaacagctccaagagaggcttggccgtgaacgacttcctgcaggtcaaaggcagcaacaacatcttcgccattggtgacaacgcctttgctggcctgcctcctaccgcccaggtggcccaccaagaggccgaatacctggccaagaactttgataagatggctcaaatccccaatttccagaagaacctgtcttcaagaaaggataagattgatctcctgttcgaggagaacaactttaagcccttcaaatacaacgacttaggcgccttagcctacctgggctccgaaagggccattgccaccatccgtagcggcaagagaacattctacaccggcggaggcttaatgaccttctacctgtggagaattttgtacctgagcatgattctgagcgcccgcagcagattaaaggtctttttcgactggatcaagctggcatttttcaagagggacttcttcgagggcctgtga

SEQ ID NO: 392 - DNA, 1542 bp, Artificial Sequence
  source: /note="Description of Artificial Sequence: Synthetic polynucleotide"
atgctgagcaagaacttgtacagcaacaagcggctgctcacctcgaccaataccatggtcagattcgcctccaccagatccaccggcgtggaaaactccggagctggccccacatctttcaagaccatgaaggtcattgacccccagcacagcgacaagccaaacgtgctgatcctgggctcggggtggggagctattagctttttaaagcacatcgacaccaagaagtacaacgtcagcatcatctctcccagaagctacttcctgtttacccccctgctgcccagcgcccctgtgggaacagtggacgagaagtccattatcgagcccatcgtgaattttgccctcaagaaaaagggcaacgtcacctactatgaggccgaggccacctctatcaaccccgaccggaataccgtgaccatcaagaacctgtctgccgtttcccagctataccagcctgagaaccatctgggcctgcaccaggccgagcccgctgagattaagtacgactacctgatcagtgccgtgggtgccgaacctaacacatttggaattcctggcgtgactgactacggtcatttcctggaggagatccccaacagcctggaaatccggagaaccttcgccgccaatctggaaaaggccaacctgctgcctaagggcgatcccgaacggagaagactgctgtccattgtggtggtgggtggaggccctacaggcgtagaagctgctggcgagctgcaggattacgtgcaccaggacctgcggaagttcctgcctgcactggccgaagaagtccagattcacttggtggaagctctgcccatcgttttgaacatgttcgagaaaaagctgtcaagctacgcccagagccatttagaaaacacttcgatcaaagtacacctgagaaccgctgtcgccaaggttgaagagaagcaactgttggccaagaccaagcacgaggacggtaagattaccgaggaaactatcccctacggcactttgatttgggccacgggcaacaaggccagacccgtaatcaccgacctgttcaagaagatccccgagcagaacagcagcaagagaggattggcagtgaacgactttctgcaggtgaaaggcagcaacaacattttcgccattggtgacaacgcctttgctggcctgccacctacagcccaagtggcgcaccaggaagccgaatacctggccaagaatttcgacaagatggctcaaataccaaatttccaaaagaacctgtcctcccggaaggataagatcgacctcttgttcgaggaaaacaacttcaagcccttcaaatacaacgacctgggcgccctggcatacctgggctccgaaagggccattgccaccatacgttccggcaagagaaccttctacaccggcggaggcttaatgaccttctacttatggagaattctgtacctgagcatgatcctaagcgccagaagcagattaaaggtgtttttcgactggatcaagatggcctttttcaaaagggacttctttgagggcctgtga

SEQ ID NO: 393 - DNA, 1542 bp, Artificial Sequence
  source: /note="Description of Artificial Sequence: Synthetic polynucleotide"
atgctgtcgaagaacctgtacagtaacaagcggttgctgacctcgacgaacaccctcgtcagattcgccagcaccagatccacaggcgtcgaaaactccggggcaggccccacctctttcaagaccatgaaagtcatcgacccccagcacagcgacaaacccaacgtgctgatcctgggctctgggtggggcgccattagctttctgaagcacatcgacaccaagaagtacaacgtctccatcatcagccctagaaagtacttcctgttcacccctttgctgccctctgcaccagtggggaccgtggacgagaagtccatcatcgagcccatcgttaatttcgccctgaagaaaaagggcaacgttacctactatgaggcagaggccaccagcatcaatcccgaccggaacaccgttaccatcaaaaacctgagcgccgtttcccagctataccagcctgagaaccacctaggcctgcatcaggccgaacctgccgagattaagtacgattatctgatcagtgctgtgggcgccgagcccaacacatttggtatccccggcgtcaccgactacggtcacttcttcaaggagattcccaactctctggaaatacggagaaccttcgccgccaacctggagaaggctaacttactgcctaagggcgaccccgagcggagaagactactgtccatcgtggtcgtgggcggaggccccactggtgtggaagctgctggtgagctgcaggactatgttcaccaggacctgagaaagttcctgcccgccctggccgaagaagtgcagattcacctggtggaagccctgcccatcgtgctgaacatgttcgagaagaagctgagcagctacgcccagtcacatttagaaaacacctccatcaaggtacatctgagaacggccgtcgccaaggtggaagaaaagcagttgttggccaagaccaaacacgaagacggtaagattaccgaggaaactatcccatacggcaccctgatttgggccaccggcaacaaggccagacccgtaatcactgacctgttcaagaaaattcccgagcagaacagctccaagcggggcctggccgtgaacgacttcctgcaggtgaaaggcagcaacaacattttcgccattggtgacaacgcctttagcgggttgcctcctaccgcccaagtggcgcaccaagaagccgagtatttggccaagaacttcgataaaatggctcagatcccaaatttccaaaagaacctgtcctccagaaaggataagattgacctcctgttcgaggagaacaactttaaacctttcaagtacaacgatctgggtgccctggcctacctgggatccgaaagagccattgcaaccatcagatccggcaagcggaccttctacaccggcggtggcttaatgaccttctacttatggagaatcctgtacctgtccatgatcctgtctgcccgcagcagactgaaggtcttcttcgactggatcaaaatggcctttttcaaaagggacttttttaagggattatga

SEQ ID NO: 394 - DNA, 1542 bp, Artificial Sequence
  source: /note="Description of Artificial Sequence: Synthetic polynucleotide"
atgctgagcaagaatttgtatagcaacaagaggctgctcaccagcaccaataccatggtgcgcttcgcttccaccagatccacaggggtggaaaacagcggagcaggccccacaagcttcaagaccatgaaggtcatcgacccccagcacagcgacaagccaaacgtgctgatactgggctctggctggggcgccattagctttctgaagcacatcgacaccaagaagtacaacgtcagcatcatctctcctagaagctatttcctgttcacccccctgctgcccagcgcaccagttggaacagtagacgaaaagtccatcattgagcccatcgtgaatttcgccctcaagaaaaagggcaacgtcacctactacgaggccgaagccaccagcatcaatcccgacaggaacaccgttaccataaagtcactgtctgccgttagccagctgtaccagcccgagaaccatctggggctgcaccaagccgagcctgccgagattaagtacgactacttaatcagcgccgtaggcgccgaacctaacacatttggaatccctggggtgaccgattacggccacttcctgaaggaaattcccaacagcctggaaataagaagaacttttgccgccaacctggaggaggctaacctgctgcctaagggcgaccccgagagaagaaggctactgagcatcgtggtggtgggtggagggcccactggcgtggaggccgctggcgagctacaggactacgttcaccaggacctgcggaagttcctccccgcactggccgaggaagtccagattcacctggtcgaagctctgcccatcgttctgaacatgttcgagaagaagcttagctcatacgcccagagccatctggaaaacacctcgatcaaagtgcacctgagaacggccgtcgccaaggtggaagagaagcaactgttggccaagaccaaacacgaggacggtaaaattaccgaggaaactatcccctacggcaccttgatttgggccaccggtaacaaggccagacccgtaatcactgaccttttcaagaagattcccgagcagaactcgagcaagcggggcctggccgtgaatgacttcctgcaggtcaaaggcagcaacaacatcttcgccattggtgacaacgcatttgccggcctgcctcctacagcccaggtagcccaccaggaggccgaatacatcgccaagaattttgataaaatggctcagataccaaatttccagaagaacctgtcttcccggaaggataaaattgacctgttgttcgaggaaaacaacttcaagcccttcaagtacaacgacctgggtgccttagcatacctgggctccgaaagagccattgccaccatcagatccggcaagcggaccttctacaccggtggaggcctgatgaccttctacctgtggcagatcctgtacatgagcatgatcctgagcgcacgcagcagactgaaggtgtttttcgactggatcaaactggccttcttcaaaagggactttttcaagggcctgtag

SEQ ID NO: 395 - DNA, 1542 bp, Artificial Sequence
  source: /note="Description of Artificial Sequence: Synthetic polynucleotide"
atgctgagcaagaacttgtatagcaacaagaggttgctgacctcgacgaacaccatggtgagattcgccagcaccagatccaccggggtggaaaactccggggcaggtcccacaagcttcaagaccatgaaggtcattgacccccagcacagcgacaaaccaaacgtgctgatcctgggttcgggctggggcgccatttcgtttctgaagcacattgacaccaagaagtacaacgtctccatcatcagccccagaagctacttcctgtttacgcccttgctgccctctgcccctgttgggaccgtggacgaaaagtccatcattgagcccatcgttaactttgccctcaagaaaaagggcaacgttacctactacgaggcagaggccaccagcatcaaccccgaccggaacaccgtgaccataaaaagcttaagcgccgtgagccagctataccagcccgagaaccatctgggcctgcaccaggccgagcccgctgaaattaagtacgattatctgatcagtgctgtgggtgccgaacctaacacctttggaatccccggcgtgaccgactacggccacttcctgaaggagattcccaactctctggaaatccggcggacctttgccgccaacctagaaaaggctaacttactgccaaagggtgaccccgagcggagaagactactgagcattgtggtcgtgggtggagggcccacaggtgtggaggccgctggtgagctacaggattatgtgcaccaggacctgagaaagttcttccccgccttggccgaggaagtccaaattcacctggtggaagctctgcccatcgtgctgaacatgttcgagaaggagctttcatcatacgcccaatcacatctggaaaacacctcgatcaaagtacacctgagaaccgccgtggccaaggtggaagaaaagcagctgttggccaagaccaagcacgaggacggtaagattaccgaggaaactatcccatacggcaccttgatttgggccacgggcaacaaggccagaccggtaatcaccgaccttttcaagaagattcctgagcagaacagcagcaagcggggcctggcagtgaacgacttcttgcaggtcaaaggcagcaacaacattttcgccatcggcgacaatgcctttgctggcctgccacctaccgcccaggtggcccaccaggaagccgaatacctggccaagaacttcgataagatggctcagatccccaatttccagaagaacctgtcctcccggaaggataagatcgatctgctgttcgaggaaaacaactttaagcctttcaaatacaacgatctgggtgccctggcctacctgggaagcgaaagagccattgcaaccatccgtagcggtaagcggacattctacaccggtggaggcctgatgaccttctacctgtggcagatcttgtacttgagcatgattctatctgcccgctcgagactgaaggtgttcttcgactggatcaagctggccttcttcaagagagacttcttcgagggcttatag

SEQ ID NO: 396 - DNA, 1542 bp, Artificial Sequence
  source: /note="Description of Artificial Sequence: Synthetic polynucleotide"
atgctatcgaagaatctgtacagcaacaagcggttgctcaccagcaccaatacgctcgtccgcttcgctagcaccagatccacaggggtggaaaacagcggagcaggtcctacatctttcaagaccatgaaggtcattgaccctcagcacagcgacaagcccaacgtgctgatcctgggctctggctggggagccatctcgtttctgaagcacatcgacaccaagaagtacaacgtcagcatcatctctcccagaagctacttcttacacacccccttgttacccagcgccccagttgggaccgtggacgagaagtcaatcatcgagcccatcgttaacttcgctctgaagaaaaaggggaacgtcacctactatgaggccgaggccaccagcatcaaccccgaccggaataccgtgaccataaaatcactgagcgccgtttcccagctataccagcccgagaaccacctagggctgcaccaggccgagcccgccgaaattaagtacgactatttaatcagtgccgtaggtgccgaacccaacacatttggtattcccggcgtcactgattacggtcacttcctgaaagaaatccccaacagcttggaaatacggagaaccttcgccgccaacctggaaaaggctaacctgttgcctaagggtgatcccgagagaagaaggctgctgagcatcgtggtcgtgggcggagggcctactggcgtagaagccgctggtgagctacaggactacgtgcaccaggacctgcggaagtttctgcccgcactggccgaagaagtgcaaattcacttggtggaagccctgcccatcgtgttgaatatgttcgagaagaagctttcaagctacgcccagagccacctggaaaacacctccatcaaggtacacctgagaaccgccgtcgccaaagtggaagagaagcagttgctggcaaagaccaagcacgaggacggcaaaattaccgaagaaactatcccctacggtaccctgatttgggccaccggcaacaaggccagacccgtgatcaccgacctgttcaagaagatccccgagcagaacagcagcaagcggggattggcagtgaacgacttcttgcaggtcgagggcagcaacaacatcttcgccatcggtgacaacgcctttgccggcctgccaccaaccgcccaagtagcccaccaggaggccgaatatttggccaagaatttcgacaagatggcccagatcccaaatttccagaagaacctgtcctcccggaaggataagatcgacctgctgttcgaggagaacaactttaaacccttcaaatacaacgacttaggtgccctggcctacctgggcagcgaaagagccattgccaccatccgtagcggtaagagaacattctacaccggcggtggcctgatgaccttctacctgtggcagatcctgtacatgagcatgatcctaagcgcaagaagcagactgaaggtgttcttcgactggattaaattagcctttttcaaaagggactttttcgagggcttatga

SEQ ID NO: 397 - DNA, 1542 bp, Artificial Sequence
  source: /note="Description of Artificial Sequence: Synthetic polynucleotide"
atgctatcgaagaacttgtacagtaacaagaggctgctcacctcgacgaacacgatggtccgcttcgctagcaccagatccaccggcgtggaaaactccggagctggccctacaagctttaagaccatgaaagtcatcgacccccagcacagcgacaaaccaaacgtgctgatactgggctctgggtggggagccatttcgtttctgaagcacatcgacaccaagaagtacaacgttagcatcatctctcccagaaagtacttcctgttcacccccctgctgccctctgcccctgtggggacagtggacgaaaagtcaattattgagcccatcgttaactttgctctgaagaaaaaggggaacgtcacctactatgaggcagaggccacctctatcaaccccgacaggaataccgtgaccataaaaagcttaagcgccgtgtcccagctgtaccagcctgagaaccatctggggctgcaccaggccgaacccgctgagattaagtacgattatttaatcagtgccgtgggtgccgagcccaacacctttggtattcctggcgtgaccgactacggtcatttcctgaaagaaatccccaactctttggaaatccggcggacctttgccgccaacctagaaaaggccaacctgctgccaaagggtgaccccgagagaagaaggctgctgagcatcgtggtcgtgggcggagggcctacaggtgtggaggctgctggcgaactgcaggactacgtgcaccaggacctgcggaagtttttccccgccctggccgaagaagtccaaattcacctggtggaagctctgcccatcgtgttgaacatgtttgagaaggagctgagcagctacgcgcagagccacttagaaaacacctccatcaaggtgcacctgagaaccgctgtggccaaggtggaagagaagcagctgttggccaagaccaagcacgaggacggtaagattaccgaggaaactattccatacggcaccctgatttgggccaccggcaacaaggcaagaccggtgatcaccgacctgttcaagaaaattcctgagcagaacagcagcaagcggggcttggccgtgaacgacttcctgcaggtcaaaggcagcaacaacattttcgccatcggcgacaatgcatttgccggcctgccaccaacagcccaggtggcccaccaagaagccgagtatctggccaagaacttcgataagatggcccagatcccaaatttccaaaagaacctgtcttcacggaaggataagatcgacctgctgttcgaggaaaacaactttaaacccttcaaatacaacgatctgggcgccctggcatacctgggcagcgaaagggccattgcaaccatcagatccggtaagcggaccttctacaccggtggaggcttaatgaccttctacttatggagaatcctgtacctgagcatgattctaagcgcccgctcgagactgaaggtcttcttcgactggattaaactggcctttttcaagagagacttcttcaaaggcctgtga

SEQ ID NO: 398 - DNA, 1542 bp, Artificial Sequence
  source: /note="Description of Artificial Sequence: Synthetic polynucleotide"
atgctgagcaagaatttgtacagtaacaagaggttgctcaccagcaccaacacgctcgtgcgcttcgccagcaccagatccacaggggtcgaaaacagcggggcaggtcccacctcttttaagaccatgaaggtcatcgacccccagcacagcgacaaaccaaacgtgctgatcctgggctcggggtggggcgccatcagctttctgaagcacatcgacaccaagaagtacaacgttagcatcatcagccctagaagctacttcctgtttacgcctctgttacccagcgccccagttgggacagtagacgaaaagtccattatcgagcccatcgtgaatttcgctctgaagaaaaagggcaacgtcacctactacgaggccgaagccacctctatcaaccccgaccggaataccgtgaccataaagagcctgtctgccgtgagccagctataccaacctgagaaccatctagggctgcaccaggccgagcccgctgagattaagtacgattacctgatcagtgctgtgggcgccgagcctaacacctttggaattcccggcgtgactgattacggtcacttcttcgaggaaatccccaacagcctggaaataagacggacttttgccgccaacctagaggaggccaacctgctgcctaagggcgatcccgagcggagaaggctgctgagcatcgtcgtcgtgggcggagggcccacaggcgtagaagccgctggcgagctgcaggactacgtgcaccaggacctgcggaagtttctgcccgccctggccgaggaagtccagattcacctggtggaagctctgcccatcgtgttgaatatgttcgagaagaagctgagctcatacgcccagtcacatctggaaaacacttccatcaaggtacacctgagaacggccgtggccaaggttgaagagaagcaattgctggccaagaccaagcacgaggacggcaagattaccgaagaaactatcccatacggtactttgatttgggccaccggtaacaaggccagacccgtaatcaccgacctgttcaagaagatccccgagcaaaacagctccaagcggggcttggccgtgaacgactttctgcaggtcaaaggcagcaacaacattttcgccatcggtgacaatgcatttagcggcctgccacctaccgcccaagtggcccaccaagaagccgagtacttggccaagaacttcgataagatggcccaaatccccaatttccaaaagaatctatcttcacggaaggataaaattgacctcttgttcgaggaaaacaactttaagcctttcaaatacaacgacttaggcgccttagcatacctgggcagcgaaagggccattgcaaccataagaagcggcaagcggaccttctacaccggtggaggcctgatgaccttctacctgtggcagatcctgtacctgtccatgatcctgagcgcccgctcgagactgaaggtctttttcgactggatcaagctggcctttttcaaaagggacttcttcaagggcttatga

SEQ ID NO: 399 - DNA, 1542 bp, Artificial Sequence
  source: /note="Description of Artificial Sequence: Synthetic polynucleotide"
atgctgagcaagaacctgtacagtaacaagcggctgctcacctcgaccaacaccctagtgcgcttcgccagcaccagatccaccggggtcgaaaactccggagctggtcccacctctttcaagaccatgaaagtcatcgacccccagcacagcgacaagccaaacgtgctgatactgggctctgggtggggagccattagctttttaaagcacattgacaccaagaagtacaacgtttccatcatctctcctagaagctacttcttattcacccctttgatgcccagcgccccagtgggaacagtggacgagaagtcaattattgagcccatcgtgaacttcgctctcaagaaaaagggcaacgtcacctactatgaggcagaagccaccagcatcaaccccgacaggaataccgtgaccatcaagagcttaagcgccgtgtcccagctgtaccagcctgaaaaccacctgggcctgcaccaggccgaacccgccgagattaagtacgactacttaatcagcgccgtaggcgcggagcccaacacatttggtattcccggcgtgactgattacggtcacttcctgaaagaaatccccaactctttggaaatcagacggacttttgccgccaatctggaaaaggccaacctgctgcctaagggtgaccccgagcggagaagactgctgtccattgtggtggttggcggtgggcctacaggcgtagaggctgctggtgagctgcaggattatgtgcaccaggacctgcggaagttcctgcccgcattggccgaggaagtgcagattcacctggtggaagctctgcccatcgtgttgaatatgttcgagaaaaagcttagcagctacgcccagtcacacctggaaaacacttcgatcaaggtgcacctgagaaccgctgtcgccaaagtggaagagaagcaattgttggccaagaccaaacacgaggacggcaaaattaccgaggaaaccatcccatacggtactctgatttgggccaccggcaacaaggccagaccggtaatcaccgaccttttcaagaagatccccgagcagaacagctccaagcggggactggccgtgaacgacttcctgcaggtggagggcagcaacaacatcttcgccattggtgacaatgcctttgctggcttgccacctacagcccaagtggcccaccaggaggccgaatacatcgccaagaacttcgacaagatggctcagatccccaatttccagaagaacctatcttcaagaaaggataagattgacctgctgttcgaggaaaacaacttcaagcccttcaagtacaacgacctgggtgccctggcatacctgggcagcgaaagagccattgccaccatcagatccggtaagcggacattctacaccggtggtggcctgatgaccttctacttatggcggatcctgtacctgtccatgatcctatctgcccgctcgagattaaaggtcttcttcgactggattaagatggccttcttcaagagggactttttcgagggcctgtga

SEQ ID NO: 400 - DNA, 1542 bp, Artificial Sequence
  source: /note="Description of Artificial Sequence: Synthetic polynucleotide"
atgctgtcgaagaatttgtatagcaaccggcggttgctgaccagcaccaacacgctcgtgcgcttcgccagcaccagatccacaggcgtggaaaactccggggctggccccaccagctttaagaccatgaaagtcattgacccccagcacagcgacaagccaaacgtgctgatcctgggttcggggtggggagccatttcgtttctgaagcacatcgacaccaagaagtacaacgtctccatcatcagccccagaaagtatttcttattcacgcccttgttaccttctgcccctgttgggaccgtggacgagaagtccattatcgagcccatcgtgaacttcgccctgaagaaaaagggcaacgttacctactacgaggccgaagccaccagcatcaaccccgaccggaacaccgtgaccataaagagcctgtctgccgtgtcccagctataccaacccgagaaccacctgggcctgcatcaggccgaacccgccgaaattaagtacgactatttaatcagcgctgtgggcgccgaacccaacacctttggaatccccggcgtgaccgactacggtcatttcctggaggaaatccccaacagcctggaaatcagacggacctttgccgccaacctagaaaaggccaacctgttgccaaagggcgaccccgagagaagaagactgctgtccattgtggtcgtgggtggagggcctactggcgtagaagctgctggcgagctgcaggattacgtgcaccaggacctgagaaagttcttccccgccttggccgaggaagtccaaattcacttggtggaagccctgcccatcgttttgaacatgtttgagaaaaagctgagctcatacgcgcagtcacatttagaaaacacttccatcaaggtgcacctgagaacggccgtggccaaggttgaagagaagcaattgctggccaagaccaagcacgaagacggcaagattaccgaagaaaccatcccctacggcaccctgatttgggccaccggcaacaaggccagacccgtgatcaccgaccttttcaagaaaatccccgagcagaacagctccaagcggggattggccgtgaacgacttcctgcaggtcaaaggcagcaacaacattttcgccatcggcgacaacgcctttgccgggctgcctcctaccgcccaagtggcgcaccaagaagccgaatatctggccaagaactttgataaaatggcccagatacccaatttccagaagaatctgtcttcaagaaaggataagattgacctcctgttcgaggaaaacaactttaagcccttcaagtacaacgacctgggcgccttagcctacctgggcagcgaaagagccattgccaccatccgttccggcaagcggaccttttacaccggtggaggcttaatgaccttctacttatggagaattctgtacttgtccatgatcctatctgcacgcagcagattaaaggtgtttttcgactggattaaactggcatttttcaagagggacttcttcaagggactgtag

SEQ ID NO: 401 - DNA, 1542 bp, Artificial Sequence
  source: /note="Description of Artificial Sequence: Synthetic polynucleotide"
atgctgtcgaagaacctgtacagtaacaagaggctgctgaccagcaccaacaccctcgtgcgcttcgccagcaccagatccaccggcgtggaaaactccggggctggccctacctctttcaagaccatgaaggtcatcgaccctcagcacagcgacaagccaaacgtgctgatcctgggttctggctggggagccatctcgtttctgaagcacatcgacaccaagaagtacaacgttagcatcatctctcccagaagctacttcttacacacccccttgctgcccagcgcccctgtgggaaccgtagacgagaagtccatcatcgagcccatcgttaatttcgctctgaagaaaaagggcaacgtcacctactacgaggccgaggccacctctatcaatcccgacaggaataccgttaccataaagtcactgtctgccgtgagccagctataccaacccgagaaccatctggggctgcaccaggccgagcccgctgagattaagtacgactatttaatcagcgctgtaggtgcggagcccaacacatttggaatccccggggtgaccgactacggccatttcttcgaggagattcccaactctttggaaatccggagaaccttcgccgccaacctagaaaaggccaacctgctgcctaagggtgatcccgagcggagaaggctgctgtccatcgtggtggtgggtggtgggcctactggtgtggaagctgctggcgagctgcaggactatgtgcaccaggacctgcggaagtttctgcccgccctggccgaggaagtccaaattcacctggtggaagccctgcccatcgtgttgaacatgttcgagaagaagcttagctcatacgcgcaaagccacttagaaaacacttcgatcaaggtgcacctgagaacggctgtggccaaggttgaagaaaagcaattgctggcaaagaccaagcacgaagacggtaaaattaccgaagaaaccatcccatacggtactctgatttgggccacgggtaacaaggccagacccgtaatcactgacctgttcaagaagatccccgagcagaacagcagcaagcggggcctggcagtgaacgactttctgcaggtcaaaggcagcaacaacattttcgccattggtgacaacgcatttagcggcctgcctcctaccgcccaggtagcccaccaagaagccgagtacctggccaagaactttgacaagatggctcagataccaaatttccaaaagaacctatcttcccggaaggataaaatcgacctgttgttcgaggagaacaactttaaacccttcaagtacaacgacttaggtgccttagcctacctgggcagcgaaagagccattgccaccatccgtagcggcaagcggaccttttacaccggtggtggcctgatgaccttctacctgtggagaattttgtacatgagcatgattctgagcgcacgcagcagactgaaggtgttcttcgactggatcaagttagcattcttcaagagagactttttcaaaggactgtga

SEQ ID NO: 402 - DNA, 1542 bp, Artificial Sequence
  source: /note="Description of Artificial Sequence: Synthetic polynucleotide"
atgctaagcaagaacctgtacagcaaccggcggctgctcaccagcaccaacaccctcgtgcgcttcgccagcaccagatccaccggcgtggaaaacagcggggctggccccaccagcttcaagaccatgaaagtcatcgacccccagcacagcgacaagcccaacgtgctgatcctgggctcgggctggggcgccatcagctttctgaagcacatcgacaccaagaagtacaacgtcagcatcatcagccccagaagctacttcctgttcacccccctgatgcccagcgcccctgtgggaaccgtggacgagaagtccatcatcgagcccatcgtgaacttcgccctgaagaaaaagggcaacgtcacctactacgaggccgaggccacctctatcaaccccgaccggaacaccgtgaccatcaagagcctgagcgccgtgtcccagctgtaccagcccgagaaccacctgggcatgcaccaggccgagcccgccgagattaagtacgactacctgatcagcgctgtgggcgccgagcccaacacctttggaatccccggcgtgaccgactacggccacttcctgaaagagatccccaacagcctggaaatccggagaaccttcgccgccaacctggaaaaggccaacttactgcctaagggtgaccccgagcggagaaggctgctgagcatcgtggtcgtgggcggaggccccacaggcgtggaagctgctggtgagctgcaggactacgttcaccaggacctgcggaagttcctgcccgccctggccgaggaagtgcagattcacctggtggaagccctgcccatcgtgctgaacatgttcgagaagaagctgagcagctacgcccagagccacctggaaaacacctccatcaaagtgcacctgagaaccgccgtggccaaggtggaagagaagcaactgctggccaagaccaagcacgaggacggcaagattaccgaggaaaccatcccctacggcaccctgatttgggccaccggcaacaaggccagacccgtgatcaccgacctgttcaagaagatccccgagcagaacagcagcaagcggggcctggccgtgaatgacttcctgcaggtcaaaggcagcaacaacatcttcgccatcggcgacaacgcatttagcgggctgccacctaccgcccaggtggcccaccaggaagccgagtacctggccaagaacttcgacaaaatggcccagatccccaatttccagaagaacctatcctcacggaaggataaaatcgacctgctgttcgaggaaaacaacttcaagcccttcaagtacaacgacttaggtgccctggcatacctgggcagcgaaagagccattgccaccatcagaagcggcaagcggaccttctacaccggcggaggcctgatgaccttctacctgtggcggatcctgtacatgagcatgatcctgagcgcccgcagcagactgaaggtgtttttcgactggatcaagctggcattcttcaagagggacttcttcaagggcttatga

SEQ ID NO: 403 - DNA, 1542 bp, Artificial Sequence
  source: /note="Description of Artificial Sequence: Synthetic polynucleotide"
atgctaagcaagaacctgtacagcaacaagcggctgctgaccagcaccaacacgctcgtgcgcttcgccagcaccagatccaccggcgtcgaaaacagcggggctggccccaccagcttcaagaccatgaaggtcatcgaccctcagcacagcgacaagcccaacgtgctgatcctgggctctggctggggcgccatcagctttctgaagcacatcgacaccaagaagtacaacgtcagcatcatcagccccagaaagtacttcctgttcacccccctgctgcccagcgcccctgtgggaaccgtggacgagaagtccatcatcgagcccatcgtgaacttcgccctgaagaaaaagggcaacgtcacctactacgaggccgaggccaccagcatcaaccccgaccggaacaccgtgaccatcaagaacctgagcgccgtgtcccagctgtaccagcccgaaaaccacctgggcctgcaccaggccgagcccgccgagattaagtacgattacctgatcagcgccgtgggcgccgaacccaacacatttggaatccctggcgtgaccgactacggccacttcttcaaagagattcccaacagcttggaaatccggcggaccttcgccgccaacctggaaaaggccaacctgctgcctaagggcgaccccgagcggagaaggctgctgagcatcgtcgtcgtgggcggaggccccacaggcgtggaagccgctggcgagctgcaggactacgtgcaccaggacctgcggaagttcctgcctgccctggccgaggaagtgcagattcacctggtggaagccctgcccatcgtgctgaacatgttcgagaaggagctgagcagctacgcccagagccacctggaaaacacttccatcaaagtgcacctgagaaccgccgtggccaaggtggaagagaagcagctgctggccaagaccaagcacgaggacggcaaaattaccgaggaaaccatcccctacggcaccctgatttgggccaccggcaacaaggcaagacccgtgatcaccgacctgttcaagaagatccccgagcagaacagctccaagcggggactggccgtgaacgacttcctgcaggtcaaaggcagcaacaacatcttcgccattggcgacaacgcctttgccgggctgcctcctaccgcccaggtggcccaccaggaagccgagtatctggccaagaacttcgacaagatggcccagatccccaatttccaaaagaacctgtcctcccggaaggataagatcgacctgctgttcgaggaaaacaacttcaagcccttcaagtacaacgacctgggtgccctggcctacctgggcagcgaaagagccattgccaccatcagaagcggcaagcggaccttctacaccggcggaggcttaatgaccttctacctgtggcggatcctgtacctgagcatgatcctgagcgccagaagcagactgaaggtgtttttcgactggatcaagctggccttcttcaagagggacttcttcgagggcctgtga

SEQ ID NO: 404 - DNA, 1542 bp, Artificial Sequence
  source: /note="Description of Artificial Sequence: Synthetic polynucleotide"
atgctgagcaagaacctgtatagcaaccggcggctgctgaccagcaccaacaccctcgtgcgcttcgccagcaccagatccaccggcgtcgaaaacagcggggctggccccacctctttcaagaccatgaaggtcatcgacccccagcacagcgacaagcccaacgtgctgatcctgggctctggctggggcgccatcagctttctgaagcacatcgacaccaagaagtacaacgtcagcatcatcagccccagaagctacttcctgcacacccccctgatgccctctgcccctgtgggaaccgtggacgagaagtccatcatcgagcccatcgtgaacttcgccctgaagaaaaagggcaacgtcacctactatgaggccgaggccacctctatcaaccccgaccggaacaccgtgaccatcaagagcctgagcgccgtgagccagctgtaccaacccgagaaccacctgggcctgcatcaggccgaacccgccgagattaagtacgactacctgatcagcgccgtgggcgccgagcccaacacctttggaatccccggcgtgaccgattacggccacttcctgaaagagatccccaacagcttggaaatccggcggaccttcgccgccaacctagaaaaggctaacctgctgcctaagggcgaccccgagcggagaaggctgctgagcatcgtcgtcgtgggcggaggccctacaggcgtggaagctgctggcgagctgcaggactacgtgcaccaggacctgcggaagttcctgcccgccctggccgaggaagtgcagattcacctggtggaagccctgcccatcgtgctgaacatgttcgagaaaaagcttagcagctacgcgcagagccacctggaaaacacctccatcaaggtgcacctgagaaccgccgtggccaaagtggaagagaagcagctgctggccaagaccaagcacgaggacggcaagattaccgaggaaaccatcccctacggcaccctgatttgggccaccggcaacaaggccagacccgtgatcaccgacctgttcaagaaaatccccgagcagaacagcagcaagcggggcctggccgtgaacgacttcctgcaggtcaaaggcagcaacaacatcttcgccatcggcgacaacgcctttgctggcctgcctccaacagcccaggtggcccaccaggaagccgagtacctggccaagaacttcgacaagatggcccagatccccaatttccagaagaacctgtcctcccggaaggataagatcgacctgctgttcgaggaaaacaacttcaagcccttcaagtacaacgacctgggcgccctggcctacctgggcagcgaaagagccattgccaccatcagaagcggcaagcggaccttctacaccggcggaggcctgatgaccttctacttatggcggatcctgtacatgagcatgattctaagcgcccgcagcagactgaaggtgttcttcgactggatcaagatggccttcttcaagagggacttctttaagggactgtga

SEQ ID NO: 405 - DNA, 1542 bp, Artificial Sequence
  source: /note="Description of Artificial Sequence: Synthetic polynucleotide"
atgctgagcaagaacctgtacagcaacaagcggctgctgaccagcaccaacaccctcgtgcgcttcgccagcaccagatccaccggcgtcgaaaacagcggggctggccccaccagcttcaagaccatgaaggtcatcgacccccagcacagcgacaagcccaacgtgctgatcctgggctcggggtggggcgccattagctttctgaagcacatcgacaccaagaagtacaacgtctccatcatcagccctagaaagtacttcctgttcacccccctgctgcccagcgccccagtgggaaccgtggacgagaagtccatcatcgagcccatcgttaacttcgccctgaagaaaaaggggaacgtcacctactatgaggccgaggccaccagcatcaaccccgaccggaacaccgttaccatcaagagcttaagcgccgtgtcccagctgtaccagcccgagaaccacctgggcctgcaccaggccgagcccgccgagattaagtacgactacttaatcagcgccgtgggcgccgagcccaacacctttggaatccccggcgtgaccgattacggccacttcctgaaagagatccccaacagcctggaaatccggcggaccttcgccgccaacctggaagaggccaacctgctgcctaagggcgaccccgagcggagaaggctgctgagcatcgtggtggtgggtggaggccccactggcgtggaagctgctggtgagctgcaggactatgtgcaccaggacctgcggaagttcttccccgccctggccgaggaagtccagattcacctggtggaagccctgcccatcgtgctgaacatgtttgagaagaagctgagcagctacgcccagagccacctggaaaacacctccatcaaagtgcacctgagaaccgccgtggccaaggtggaagagaagcaattgctggccaagaccaagcacgaggacggtaagattaccgaggaaaccatcccctacggcaccctgatttgggccaccggcaacaaggccagacccgtgatcaccgacctgttcaagaagatccccgagcagaacagcagcaagcggggcctggccgtgaacgacttcctgcaggtcaaaggcagcaacaacatcttcgccatcggcgacaacgcctttgccgggctgcctcctacagcccaggtggcccaccaggaagccgagtacatcgccaagaacttcgacaagatggcccagatacccaatttccagaagaacctgtcctcccggaaggataagatcgacctcctgttcgaggaaaacaacttcaagcccttcaagtacaacgacctgggcgccttagcatacctgggcagcgaaagagccattgccaccatcagaagcggcaagcggaccttctacaccggcggaggcctgatgaccttctacctgtggcggatcctgtacctgagcatgatcctgagcgcccgcagcagactgaaggtgttcttcgactggatcaagatggccttcttcaagagggacttcttcaagggcctgtga

SEQ ID NO: 406 - DNA, 1542 bp, Artificial Sequence
  source: /note="Description of Artificial Sequence: Synthetic polynucleotide"
atgctgagcaagaacctgtacagcaaccggcggctgctgacctcgaccaacaccctcgtgcgcttcgccagcaccagatccaccggggtcgaaaacagcggggctggccccaccagcttcaagaccatgaaggtcattgaccctcagcacagcgacaagcccaacgtgctgatcctgggctcgggctggggcgccatcagctttctgaagcacatcgacaccaagaagtacaacgtcagcatcatcagccccagaagctacttcctgttcacccccctgctgcccagcgcccctgtgggaaccgtggacgagaagtccatcatcgagcccatcgtgaacttcgccctgaagaaaaagggcaacgtcacctactacgaggccgaggccaccagcatcaaccccgaccggaacaccgtgaccatcaagaacctgagcgccgtttcccagctgtaccaacccgagaaccacctgggcatgcaccaggccgaacccgccgagattaagtacgactacctgatcagcgctgtgggcgccgagcccaacacctttggaatccccggcgtgaccgactacggccacttcctgaaagagatccccaacagcctggaaatcagacggactttcgccgccaacctggaaaaggccaacctgttgcctaagggcgaccccgaacggagaaggctgctgagcattgtggtcgtgggcggaggccccactggcgtggaagctgctggcgagctgcaggactacgtgcaccaggacctgcggaagttcctgcccgcactggccgaggaagtgcagattcacctggtggaagccctgcccatcgtgctgaacatgttcgagaagaagctgagcagctacgcccagagccacttagaaaacacctccatcaaggtgcatctgagaaccgccgtggccaaggtggaagagaagcagctgctggcaaagaccaagcacgaggacggcaagattaccgaggaaaccatcccctacggcaccctgatttgggccaccggcaacaaggcaagaccggtgatcaccgacctgttcaagaagatccccgagcagaacagcagcaagcggggcctggccgtgaacgacttcctgcaggtcaaaggcagcaacaacatcttcgccatcggcgacaacgcctttgccggcctgcctcctacagcccaggtggcgcaccaggaagccgaatacctggccaagaacttcgacaagatggcccagatccccaatttccagaagaacctgtcctcccggaaggataagatcgacctgctgttcgaggaaaacaactttaagcccttcaagtacaacgatctgggcgccctggcctacctgggcagcgaaagagccattgccaccataagaagcggcaagcggaccttctacaccggtggaggcctgatgaccttctacctgtggcagatcctgtacctgagcatgatcctgagcgccagaagcagactgaaggtgttcttcgactggatcaagctggccttcttcaagagagacttcttcgagggcctgtga

SEQ ID NO: 407 - DNA, 1542 bp, Artificial Sequence
  source: /note="Description of Artificial Sequence: Synthetic polynucleotide"
atgctgagcaagaacctgtacagtaacaagcggctgctgacctcgaccaacaccctcgtgcgcttcgctagcaccagatccacaggcgtcgaaaacagcggggctggccccaccagcttcaagaccatgaaggtcatcgacccccagcacagcgacaaacccaacgtgctgatcctgggctctggctggggcgccatcagctttctgaagcacatcgacaccaagaagtacaacgtcagcatcatcagccccagaagctacttcctgcacacccccctgctgcccagcgcccctgtgggaacagtggacgagaagtccatcatcgagcccatcgtgaacttcgccctgaagaaaaagggcaacgttacctactacgaggccgaggccaccagcatcaaccccgaccggaacaccgtgaccatcaagaacctgagcgccgtgtcccagctgtaccagcccgagaaccatctgggcctgcaccaggccgagcccgccgagattaagtacgactacttaatcagcgccgtgggcgccgagcccaacacctttggaatccccggcgtgaccgattacggccacttcctgaaagagatccccaacagcctggaaatccggcggactttcgccgccaacctggaggaggccaacctgctgcctaagggcgaccccgagcggagaaggctgctgagcatcgtggtcgtgggcggagggcccactggcgtggaggctgctggcgagctgcaggactacgttcaccaggacctgcggaagttcctccccgccctggccgaggaagtgcagattcacctggtggaagccctgcccatcgtgctgaacatgttcgagaagaagctgagcagctacgcccaaagccacctggaaaacacctcgatcaaggtgcacctgagaaccgccgtggccaaggtggaagagaagcagctgctggccaagaccaagcacgaggacggcaagattaccgaggaaaccatcccctacggtaccctgatttgggccaccggcaacaaggccagacccgtgatcaccgacctgttcaagaagatccccgagcagaacagcagcaagcggggcctggccgtgaacgacttcctgcaggtcaaaggcagcaacaacatcttcgccatcggcgacaacgcctttagcgggctgcctcctacagcccaggtggcccaccaggaagccgagtacctggccaagaacttcgacaaaatggcccagatccccaatttccagaagaacctgtcttcccggaaggataagatcgacctgctgttcgaggaaaacaacttcaagcccttcaagtacaacgacctgggcgccctggcctacctgggcagcgaaagagccattgccaccatcagaagcggcaagagaaccttctacaccggcggaggcttaatgaccttctacttatggcagatcctgtacctgagcatgatcctgagcgcccgcagcagactgaaggtgtttttcgactggatcaagttagccttcttcaagagggacttcttcaagggcttatga

SEQ ID NO: 408 - DNA, 1542 bp, Artificial Sequence
  source: /note="Description of Artificial Sequence: Synthetic polynucleotide"
atgctaagcaagaacctgtacagcaacaagcggttgctgaccagcaccaacaccctcgtgcgcttcgccagcaccagatccaccggggtcgaaaactccggggctggccctaccagcttcaagaccatgaaggtcatcgacccccagcacagcgacaagcccaacgtgctgatcctgggctctgggtggggcgccatcagctttctgaagcacatcgacaccaagaagtacaacgttagcatcatcagccccagaagctatttcctgcacacccccctgttaccctctgccccagtgggaaccgtggacgaaaagtccatcatcgagcccatcgtgaacttcgccctgaagaaaaagggcaacgttacctactacgaggccgaggccaccagcatcaaccccgaccggaacaccgtgaccatcaaaagcctgagcgccgtgtcccagctgtaccagcccgagaaccacctgggcatgcaccaggccgagcccgccgagattaagtacgactacctgatcagcgccgtgggtgccgagcccaacacctttggaatccccggcgtgaccgactacggccacttcttcaaagagatccccaacagcctggaaatccggcggaccttcgccgccaacctggagaaggccaacctgctgcctaagggcgaccccgagcggagaaggctgctgagcatcgtggtcgtgggcggaggccccacaggcgtggaggctgctggcgagctgcaggactacgtgcaccaggacctgcggaagttcctgcccgccctggccgaggaagtgcagattcacttggtggaagccctgcccatcgtgctgaacatgttcgagaagaagctgagcagctacgcccagagccacctggaaaacacctcgatcaaggtgcacctgagaaccgccgtggccaaggtggaagagaagcagctgctggccaagaccaagcacgaggacggcaagattaccgaggaaaccatcccctacggcaccctgatttgggccaccggcaacaaggccagacccgtgatcactgacctgttcaagaagatccccgagcagaacagcagcaagcggggcctggccgtgaacgacttcctgcaggtcaaaggcagcaacaacatcttcgccatcggcgacaacgcctttgccggcctgcctcctaccgcccaggtagcccaccaggaggccgagtacctggccaagaacttcgacaagatggcccagatcccaaatttccagaagaacctgtcctcccggaaggataagatcgacctgctgttcgaggaaaacaacttcaagcccttcaagtacaacgacctgggcgccctggcctacctgggcagcgaaagagccattgccaccatcagaagcggcaagagaaccttctacaccggcggtggcctgatgaccttctacctgtggcggatcctgtacatgtccatgatcctgagcgcccgctcgagactgaaggtgttcttcgactggatcaagatggccttcttcaagagggacttcttcaagggcctgtga

SEQ ID NO: 409 - DNA, 1542 bp, Artificial Sequence
  source: /note="Description of Artificial Sequence: Synthetic polynucleotide"
atgctgagcaagaacctgtacagcaacaagcggctgctgaccagcaccaacaccctcgtccgcttcgccagcaccagatccacaggggtcgaaaacagcggggctggccccaccagcttcaagaccatgaaggtcatcgacccccagcacagcgacaaacccaacgtgctgatcctgggctcgggctggggcgccatcagctttctgaagcacatcgacaccaagaagtacaacgtcagcatcatcagccccagaagctacttcttattcacccccctgatgcccagcgcccctgtgggaaccgtggacgagaagtccattatcgagcccatcgtgaacttcgccctgaagaaaaagggcaacgtcacctactacgaggccgaggccaccagcatcaaccccgaccggaacaccgtgaccatcaagagcttaagcgccgtgtcccagctgtaccaacccgagaaccacctgggcctgcaccaggccgagcccgccgagattaagtacgactacctgatcagtgccgtgggcgccgagcccaacacctttggaatccctggcgtgaccgactacggccacttcttcaaagagatccccaacagcctggaaatccggcggaccttcgccgccaacctggaaaaggccaacctgctgccaaagggcgaccccgagagaagaaggctgctgagcattgtggtcgtgggcggagggcccacaggcgtggaagctgctggcgagctgcaggactacgtgcaccaggacctgcggaagttcctgcccgccctggccgaggaagtgcagattcacctggtggaagccctgcccatcgtgctgaacatgttcgagaagaagctgagcagctacgcccagagccacttagaaaacacctccatcaaggtacacctgagaaccgccgtggccaaggtggaagaaaagcagctgttggccaagaccaagcacgaggacggcaagattaccgaggaaaccattccctacggcactctgatttgggccaccggcaacaaggccagacccgtgatcaccgacctgttcaagaagatccccgagcagaacagcagcaagcggggactggccgtgaacgacttcttgcaggtcaaaggcagcaacaacatcttcgccatcggcgacaacgcctttagcggcctgcctcctacagcccaggtggcccaccaggaagccgagtacctggccaagaacttcgacaagatggcccagatccccaatttccagaagaacctgtcctcccggaaggataagatcgacctcctgttcgaggaaaacaacttcaagcccttcaagtacaacgacctgggcgccttagcctacctgggcagcgaaagagccattgccaccataagaagcggcaagcggaccttctacaccggcggaggcttaatgaccttctacctgtggcagatcctgtacatgagcatgatcctgagcgccagaagcagactgaaggtgttcttcgactggattaagctggccttcttcaagagggacttcttcaagggcctgtga

SEQ ID NO: 410 - DNA, 1542 bp, Artificial Sequence
  source: /note="Description of Artificial Sequence: Synthetic polynucleotide"
atgctgagcaagaacctgtacagcaacaagcggctgctgaccagcaccaataccatggtgcgcttcgccagcaccagatccaccggcgtcgaaaacagcggggctggccctaccagcttcaagaccatgaaggtcatcgacccccagcacagcgacaagcccaacgtgctgatcctgggctctggctggggcgccatcagctttctgaagcacatcgacaccaagaagtacaacgtcagcatcatctctcccagaagctacttcctgttcacccccctgctgcccagcgcacctgtgggaaccgtggacgagaagtccatcattgagcccatcgttaacttcgctctgaagaaaaagggcaacgtcacctactacgaggccgaagccaccagcatcaaccccgaccggaacaccgtgaccatcaagagcctgagcgccgtgtcccagctgtaccaacccgagaaccacctgggcctgcaccaggccgagcccgccgagattaagtacgactatttaatcagtgccgtgggcgccgagcccaacacctttggaatccccggcgtgaccgactacggtcacttcttcgaggagatccccaacagcttggaaatccggcggaccttcgccgccaacctggaaaaggccaacctgctgcctaagggcgaccccgagcggagaaggctgctgagcatcgtggtcgtgggcggaggccccacaggcgtggaagctgctggcgagctgcaggattacgtgcaccaggacctgcggaagttcttccccgccctggccgaggaagtgcagattcacctggtggaagccctgcccatcgtgctgaacatgttcgagaagaagctgagcagctacgcccagagccacttagaaaacacctccatcaaggtgcacctgagaaccgccgtggccaaggtggaagagaagcagttgctggccaagaccaaacacgaggacggcaaaattaccgaggaaaccatcccctacggcaccctgatttgggccaccggcaacaaggccagacccgtgatcaccgacctgttcaagaagatccccgagcagaacagcagcaagcggggcttggccgtgaacgacttcctgcaggtcaaaggcagcaacaacatcttcgccatcggcgacaacgcctttgccggcctgccacctacagcccaggtggcccaccaggaagccgagtatctggccaagaacttcgacaagatggcccagatccccaatttccagaagaacctatcctcccggaaggataagatcgacctgctgttcgaggaaaacaacttcaagcccttcaagtacaacgacctgggcgccctggcctacctgggcagcgaaagagccattgccaccataagaagcggcaagcggaccttctacaccggcggtggcctgatgaccttctacctgtggcagatcctgtacctgagcatgatcctgagcgcccgcagcagactgaaggtgttcttcgactggatcaagttagcattcttcaagagggacttcttcaagggattatga

SEQ ID NO: 411 - DNA, 1542 bp, Artificial Sequence
  source: /note="Description of Artificial Sequence: Synthetic polynucleotide"
atgctgagcaagaacctgtatagcaaccggcggctgctcaccagcaccaacaccctcgtgcgcttcgcctccaccagatccaccggcgtcgaaaacagcggagctggccccaccagctttaagaccatgaaggtcatcgacccccagcacagcgacaagcccaacgtgctgatcctgggctctggctggggcgccatctcgtttctgaagcacatcgacaccaagaagtacaacgtcagcatcatcagccccagaaagtacttcttattcacccccctgatgcccagcgcccctgtgggaaccgtggacgagaagtccatcatcgagcccatcgttaacttcgccctgaagaaaaagggcaacgttacctactacgaggccgaggccaccagcatcaaccccgaccggaacaccgtgaccatcaagtcactgtctgccgtgtcccagctgtaccagcccgagaaccatctgggcctgcaccaagccgagcctgccgagattaagtacgactacctgatcagcgctgtgggcgccgagcccaacacctttggaatccccggcgtgaccgactacggccacttcctgaaagagattcccaacagcctggaaatccggcggaccttcgccgccaacctggaaaaggccaacctgctgcctaagggcgaccccgagcggagaaggctgctgagcattgtggtcgtgggcggaggccccacaggcgtggaagccgctggcgagctgcaggactacgtgcaccaggacctgcggaagttcttccctgccctggccgaggaagtgcagattcacctggtggaagccctgcccatcgttctgaacatgttcgagaagaagctgagcagctacgcccagagccacctggaaaacacctccatcaaggtgcacctgagaacggccgtggccaaggtggaagagaagcagctgctggccaagaccaagcacgaggacggcaagattaccgaggaaaccatcccctacggcaccctgatttgggccaccggtaacaaggccagacccgtgatcaccgacctgttcaagaagatccccgagcagaacagcagcaagcggggcctggccgtgaatgacttcctgcaggtcaaaggcagcaacaacatcttcgccatcggtgacaacgcctttgccggcttgcctcctacagcccaggtggcccaccaggaagccgagtacctggccaagaacttcgacaagatggcccaaatccccaatttccagaagaacctgtcctcccggaaggataagatcgacctgctgttcgaggaaaacaacttcaagcccttcaagtacaacgacctgggcgccctggcctacctgggcagcgaaagagccattgccaccatcagaagcggcaagcggaccttctacaccggtggaggcctgatgaccttctacctgtggcagatcctgtacctgagcatgatcctgagcgcccgcagcagactgaaggtgttcttcgactggattaagctggccttcttcaagagggacttcttcaagggcctgtag

SEQ ID NO: 412 - DNA, 1542 bp, Artificial Sequence
  source: /note="Description of Artificial Sequence: Synthetic polynucleotide"
atgctgagcaagaacctgtacagcaaccggcggctgctcaccagcacgaacaccctcgtgcgcttcgccagcaccagatccacaggcgtcgaaaacagcggggctggccccaccagcttcaagaccatgaaggtcatcgacccccagcacagcgacaagcccaacgtgctgatcctgggctctggctggggcgccatcagctttctgaagcacatcgacaccaagaagtacaacgtcagcatcatctctcccagaaagtatttcctgcacacccccctgctgcccagcgcccctgtgggaaccgtggacgagaagtccatcattgagcccatcgtgaacttcgccctgaagaaaaaggggaacgtcacctactacgaggccgaggccaccagcatcaaccccgaccggaataccgtgaccatcaagaacctgagcgccgtttcccagctgtaccagcccgagaaccacctgggcctgcaccaggccgagcccgccgagattaagtacgactacctgatcagcgccgtgggcgccgagcccaacacctttggaatccctggcgtgaccgactacggccacttcctgaaagaaatccccaacagcctggaaatccggagaaccttcgccgccaacctggaaaaggccaacctgctgcctaagggcgaccccgagcggagaaggctactgagcatcgtggtcgtgggcggaggccccacaggtgtggaagctgctggcgagctgcaggattacgtgcaccaggacctgcggaagttcctgcccgccctggccgaggaagtgcagattcacctggtggaagctctgcccatcgttctgaacatgttcgagaagaagctgagcagctacgcccagagccacctggaaaacacctccatcaaggtgcacctgagaaccgctgtggccaaggtggaagagaagcagctgctggccaagaccaagcacgaggacggcaagattaccgaggaaaccatcccctacggcactctgatttgggccaccggcaacaaggccagacccgtaatcaccgacctgttcaagaagatccccgagcagaacagctccaagcggggcctggccgtgaacgactttctgcaggtcgagggcagcaacaacatcttcgccatcggcgacaacgcctttgccggcctgcctcctacagcccaggtggcccaccaagaagccgagtacctggccaagaatttcgacaagatggcccaaatccccaatttccagaagaacctgtcctcccggaaggataagatcgacctgctgttcgaggaaaacaacttcaagcccttcaagtacaacgacctgggcgccctggcctacctgggcagcgaaagagccattgccaccataagaagcggcaagcggaccttctacaccggcggaggcttaatgaccttctacctgtggcggatcctgtacctgagcatgatcctgtctgccagaagcagactgaaggtgttcttcgactggatcaagctggccttcttcaagagggacttcttcaagggcctgtga

SEQ ID NO: 413 - DNA, 1542 bp, Artificial Sequence
  source: /note="Description of Artificial Sequence: Synthetic polynucleotide"
atgctgagcaagaatctgtacagcaacaagcggctgctcaccagcaccaacacgctcgtgcgcttcgccagcaccagatccaccggcgtcgaaaacagcggggctggccccaccagcttcaagaccatgaaggtcatcgacccccagcacagcgacaagcccaacgtgctgatcctgggctctggctggggcgctatcagctttctgaagcacatcgacaccaagaagtacaacgtcagcatcatcagccccagaagctatttcctgttcacccctctgatgcccagcgcccctgtgggaaccgtggacgagaagtccatcatcgagcccatcgtgaacttcgccctgaagaaaaagggcaacgtcacctactacgaggcagaggccaccagcatcaaccccgaccggaacaccgtgaccatcaagagcctgagcgccgtgtcccagctgtaccagcccgagaaccacctgggcctgcaccaggccgagcccgccgagattaagtacgactacctgatcagcgccgtgggcgccgagcccaacacatttggaatccccggcgtcaccgactacggccacttcttcaaggagatccccaacagcctggaaatccggcggaccttcgccgccaacctggaaaaggccaacctgctgcctaagggcgaccccgagagaagaaggctgctgagcatcgtggtcgtgggcggaggccccacaggcgtggaagctgctggtgaactgcaggactacgtgcaccaggacctgcggaagttcctgcccgccctggccgaggaagtgcagattcacctggtggaagccctgcccatcgtgctgaacatgttcgagaaggagctgagctcatacgcccagagccacctggaaaacacctccatcaaggtgcacctgagaaccgccgtggccaaggtggaagagaagcagctgctggccaagaccaagcacgaggacggcaagattaccgaggaaaccatcccctacggcaccctgatttgggccaccggcaacaaggccagacccgtgatcaccgacctgttcaagaagatccccgagcagaacagcagcaagcggggcctggccgtgaacgacttcctgcaggtcaaaggcagcaacaacatcttcgccatcggcgacaatgcctttgccggcctgcctcctacagcccaggtggcccaccaggaagccgagtacctggccaagaacttcgataagatggctcagatccccaatttccagaagaacctatcctcacggaaggataagatcgatctcctgttcgaggagaacaacttcaagcctttcaagtacaacgacctgggcgccctggcctacctgggcagcgaaagagccattgccaccatcagatccggtaagcggaccttctacaccggcggaggcctgatgaccttctacctgtggcggatcttgtacatgagcatgatcctgagcgcccgcagcagactgaaggtgttcttcgactggatcaagatggccttcttcaagagggacttttttaagggcctgtga

SEQ ID NO: 414 - DNA, 1542 bp, Artificial Sequence
  source: /note="Description of Artificial Sequence: Synthetic polynucleotide"
atgctgagcaagaacctgtacagcaacaagaggctgctcaccagcaccaacacgctcgtgcgcttcgccagcaccagatccaccggcgtcgaaaacagcggggctggccccacaagcttcaagaccatgaaggtcatcgacccccagcacagcgacaaacccaacgtgctgatcctgggctctggctggggcgccatcagctttctgaagcacattgacaccaagaagtacaacgtcagcatcatcagccccagaaagtacttcctgttcacccctctgctgcctagcgcccctgtgggaaccgtggacgagaagtccatcatcgagcccatcgtgaacttcgccctgaagaaaaagggcaacgtcacctactacgaggccgaggccaccagcatcaaccccgaccggaacaccgtgaccatcaagagcctgagcgccgtgtcccagctgtaccagcccgagaaccatctgggcctgcatcaggccgagcccgccgagattaagtacgactatctgatcagcgccgtgggcgccgagcccaacacctttggaattcccggcgtgaccgactacggccacttcctggaggagatccccaacagcctggaaatccggcggaccttcgccgccaacctggaaaaggccaacctgttgcctaagggcgaccccgagcggagaaggctgctgagcatcgtggtcgtgggcggaggccccacaggcgtggaagctgctggtgagctgcaggactacgtgcaccaggacctgcggaagttcttccccgccctggccgaggaagtgcagattcacctggtcgaagctctgcccatcgtgttgaacatgttcgagaagaagctgagcagctacgcccagagccacctggaaaacacttccatcaaggtgcacctgagaaccgccgtggccaaggtggaagagaagcagttgctggccaagaccaagcacgaggacggcaagattaccgaggaaaccatcccctacggcaccctgatttgggccaccggcaacaaggccagacccgtgatcaccgacctgttcaagaagatccctgagcagaactcgagcaagcggggcttggccgtgaacgacttcctgcaggtgaaaggcagcaacaacatcttcgccatcggtgacaacgcctttgccggcctgcctcctacagcccaggtggcccaccaggaagccgagtacatcgccaagaacttcgacaagatggcccagatccccaatttccagaagaacctgtcctccagaaaggataagatcgacctgctgttcgaggaaaacaacttcaagcccttcaagtacaacgacctgggcgccctggcctacctgggcagcgaaagagccattgccaccatcagaagcggcaagcggaccttctacaccggcggaggcctgatgaccttctacctgtggcggattctgtacctgagcatgatcctgagcgccagaagcagactgaaggtgttcttcgactggatcaagctggccttcttcaagagggacttcttcgagggactgtga

SEQ ID NO: 415 - DNA, 1542 bp, Artificial Sequence
  source: /note="Description of Artificial Sequence: Synthetic polynucleotide"
atgctgagcaagaacctgtacagtaaccggcggctgctgaccagcaccaacaccctcgtgcgcttcgccagcaccagatccaccggcgtcgaaaactccggggctggccccaccagcttcaagaccatgaaggtcatcgacccccagcacagcgacaagcccaacgtgctgatcctgggctctggctggggcgccatcagctttctgaagcacatcgacaccaagaagtacaacgtcagcatcatcagccccagaaagtacttcctgcacacccccctgctgcccagcgcccctgtgggaaccgtggacgagaagtccatcatcgagcccatcgtgaacttcgccctgaagaaaaaggggaacgtcacctactacgaggccgaggccaccagcatcaaccccgaccggaacaccgtgaccatcaagagcctgagcgccgtgtcccagctgtaccagcccgagaaccacctgggcctgcaccaggccgagcccgccgagattaagtacgactacctgatcagcgccgtgggcgcggagcccaacacctttggaatccccggcgtgaccgactacggccatttcctgaaagagatccccaactctctggaaatacggcggacctttgccgccaacctggaaaaggccaacctgctgcctaagggcgaccccgagcggagaaggctgctgagcatcgtggtcgtgggcggagggcccacaggcgtggaagctgctggcgagctgcaggactacgtgcaccaggacctgcggaagttcctgcccgcactggccgaggaagtgcagattcacctggtggaagccctgcccatcgtgctgaatatgttcgagaagaagctgagcagctacgcccagagccacttagaaaacacctccatcaaggtacacctgagaaccgccgtggccaaggtggaagagaagcagctgctggccaagaccaagcacgaggacggcaagataaccgaggaaaccatcccctacggcaccttgatttgggccaccggcaacaaggccagacccgtgatcaccgacctgttcaagaagatccccgagcagaacagcagcaagcggggcctggccgtgaacgactttctgcaggtcaaaggcagcaacaacatcttcgccatcggcgacaacgcatttagcggcctgcctcctacagcccaggtggcccaccaggaagccgaatatatcgccaagaactttgacaagatggcccagatacccaatttccagaagaacctgtcctcccggaaggataagatcgatctcctgttcgaggaaaacaacttcaaacccttcaagtacaacgacctgggcgccctggcatacctgggcagcgaaagagccattgccaccatcagaagcggcaagcggaccttctacaccggtggaggcctgatgaccttctacctgtggcggatcctgtacctgagcatgatcctgagcgcccgcagcagactgaaggtgttcttcgactggatcaagctggcctttttcaagagggacttcttcaagggactgtga

SEQ ID NO: 416 - DNA, 1542 bp, Artificial Sequence
  source: /note="Description of Artificial Sequence: Synthetic polynucleotide"
atgctgagcaagaacctgtacagcaacaagcggctgctgaccagcaccaacaccctcgtgcgcttcgccagcaccagatccacaggcgtcgaaaacagcggggctggccccaccagcttcaagaccatgaaggtcatcgacccccagcacagcgacaagcccaacgtgctgatcctgggctctggctggggcgccatcagctttttaaagcacatcgacaccaagaagtacaacgtcagcatcatcagccccagaagctacttcctgttcacccctctgctgcccagcgcccctgtgggaaccgtggacgagaagtccatcatcgagcccatcgtgaacttcgccctcaagaaaaagggcaacgtcacctactacgaggccgaggccaccagcatcaaccccgaccggaacaccgtgaccatcaagagcctgtctgccgtgtcccagctgtaccagcctgagaaccacctgggcctgcaccaggccgagcccgccgagattaagtacgactacctgatcagcgctgtgggcgccgagcccaacacctttggaatccccggcgtgaccgactacggccacttcttcaaagagatccccaacagcttggaaatacggcggaccttcgccgccaatctggaagaggccaacctgctgcctaagggtgaccccgagcggagaaggctgctgagcatcgtcgtcgtgggcggagggcccacaggcgtggaagctgctggcgaactgcaggactacgttcaccaggacctgcggaagttcctgcccgccctggccgaggaagtgcagattcacctggtggaagccctgcccatcgtgctgaacatgttcgagaaagagctgtcaagctacgcccagagccatctggaaaacacctccatcaaggtgcacctgagaaccgccgtggccaaggtggaagagaagcagctgctggccaagaccaagcacgaggacggcaagattaccgaggaaaccatcccctacggtactctgatttgggccaccggcaacaaggccagacccgtgatcactgacctgttcaagaagatccccgagcagaacagcagcaagcggggcctggccgtgaacgactttctgcaggtcaaaggcagcaacaacatcttcgccatcggtgacaacgcctttgccggcctgcctcctacagcccaggtggcccaccaggaagccgagtacatcgccaagaacttcgataagatggcccagatccccaatttccagaagaacctgtcctcccggaaggataagatcgacctgctgttcgaggaaaacaacttcaagcctttcaagtacaacgacctgggcgccctggcctacctgggcagcgaaagagccattgccaccatcagaagcggcaagcggaccttctacaccggcggaggcttaatgaccttctacctgtggcggatcctgtacttgagcatgatcctgagcgccagaagcagactgaaggtgtttttcgactggatcaagatggccttcttcaagagggacttcttcaagggcctgtga

SEQ ID NO: 417 - DNA, 1542 bp, Artificial Sequence
  source: /note="Description of Artificial Sequence: Synthetic polynucleotide"
atgctgagcaagaacctgtacagcaaccggcggctgctgaccagcaccaacaccctcgtgcgcttcgccagcaccagatccacaggcgtggaaaactccggggctggccccaccagcttcaagaccatgaaggtcatcgacccccagcacagcgacaagcccaacgtgctgatcctgggctctggctggggcgccatcagctttctgaagcacatcgacaccaagaagtacaacgtcagcatcatcagccctagaagctacttcctgttcacccccctgctgcccagcgcacctgtgggaaccgtggacgagaagtccatcattgagcccatcgtgaacttcgctctgaagaaaaagggcaacgtcacctactacgaggccgaggccaccagcatcaaccccgaccggaacaccgtgaccatcaagagcctgagcgccgtgtcccagctgtaccagcccgagaaccacctgggcctgcaccaggccgagcccgccgagattaagtacgactacctgatcagcgccgtgggcgccgagcccaacacatttggaatccccggcgtgaccgactacggccatttcctgaaagagatccccaactctctggaaatccggcggaccttcgccgccaacctggaagaggctaacctgctgcctaagggcgatcccgaacggagaagactactgagcattgtggtcgtgggcggaggccccacaggcgtggaagctgctggcgagctgcaggactatgtgcaccaggacctgcggaagttcctccccgccctggccgaggaagtgcagattcacctggtggaagccctgcccatcgtgctgaacatgttcgagaaggagctgagcagctacgcccagagccacctggaaaacacctcgatcaaggtgcacctgagaaccgccgtggccaaggtggaagagaagcagctgctggccaagaccaagcacgaagacggcaagattaccgaggaaaccatcccatacggcaccctgatttgggccaccggcaacaaggccagacccgtgatcaccgacctgttcaagaagatccccgagcagaacagcagcaagcggggcctggccgtgaacgacttcctgcaggtcaaaggcagcaacaacatcttcgccattggtgacaacgcctttgccggcctgcctcctaccgcccaggtggcccaccaggaagccgagtacctggccaagaacttcgacaagatggcccagatccccaatttccagaagaacctatcctcccggaaggataagatcgatctgctgttcgaggaaaacaacttcaagcccttcaagtacaacgatctgggcgccctggcctacctgggctccgaaagagccattgccaccatcagaagcggcaagcggaccttctacaccggcggaggcctgatgaccttctacctgtggcagatcctgtacctgagcatgatcctgagcgcccgcagcagactgaaggtgttcttcgactggattaagatggccttcttcaagagggacttcttcaagggcctgtga

SEQ ID NO: 418 - DNA, 1542 bp, Artificial Sequence
  source: /note="Description of Artificial Sequence: Synthetic polynucleotide"
atgctgagcaagaacttgtacagcaacaagcggctgctgaccagcaccaacaccctcgtgagattcgccagcaccagatccaccggcgtcgaaaacagcggggctggccccaccagcttcaagaccatgaaggtcatcgacccccagcacagcgacaagcccaacgtgctgatcctgggctctggctggggcgccatcagctttttaaagcacatcgacaccaagaagtacaacgtctccatcatcagccccagaaagtacttcctgttcacccccctgctgccctctgcccctgtgggaaccgtggacgagaagtccatcatcgagcccatcgtgaacttcgccctgaagaaaaagggcaacgtcacctactacgaggcagaggccaccagcatcaaccccgaccggaacaccgtgaccatcaagagcttaagcgccgtttcccagctgtaccaacctgagaaccacctgggcctgcatcaggccgagcccgccgagattaagtacgactacctgatcagcgccgtaggcgccgagcccaacacctttggaatccccggggtgactgactacggccacttcctgaaagaaatccccaacagcctggaaatccggcggaccttcgccgccaacctggaaaaggccaacctgctgcctaagggcgaccccgaacggagaaggctgctgagcatcgtggtcgtgggcggaggccccacaggcgtggaagctgctggcgagctgcaggactacgtgcaccaggacctgcggaagttcttccccgccctggccgaggaagtccagattcacctggtggaagccctgcccatcgtgctgaacatgttcgagaagaagctgagcagctacgcccagagccacctggaaaacacctccatcaaggtgcacctgagaaccgctgtggccaaggtggaagagaagcagctgctggccaagaccaagcacgaggacggcaagattaccgaggaaaccatcccctacggcactctgatttgggccaccggcaacaaggccagacccgtgatcactgacctgttcaagaagatccccgagcagaacagcagcaagagaggcctggccgtgaacgacttcctgcaggtcgagggcagcaacaacatcttcgccatcggcgacaacgcctttagcgggctgcctcctacagcccaggtggcccaccaggaagccgagtacctggccaagaacttcgacaagatggctcagatcccaaatttccagaagaacctgtcctcccggaaggataagatcgacctgctgttcgaggaaaacaacttcaagcccttcaagtacaacgacctgggcgccctggcatacctgggcagcgaaagagccattgccaccatcagaagcggcaagcggaccttctacaccggcggtggcctgatgaccttctacctgtggcggatcctgtacctgagcatgatcctgagcgcccgcagcagactgaaggtcttcttcgactggatcaagctggcctttttcaagagggacttcttcgagggcctgtag

SEQ ID NO: 419 - DNA, 1542 bp, Artificial Sequence
  source: /note="Description of Artificial Sequence: Synthetic polynucleotide"
atgctgagcaagaacctgtacagcaacaagcggctgctgaccagcaccaacaccatggtgcgcttcgccagcaccagatccaccggcgtcgaaaacagcggggctggccccaccagcttcaagaccatgaaggtcatcgacccccagcacagcgacaagcccaacgtgctgatcctgggctctggctggggcgccatcagctttttaaagcacatcgacaccaagaagtacaacgttagcatcatcagccccagaagctacttcctgttcacccccctgctgcccagcgcccctgttggaacagtggacgagaagtccatcatcgagcccatcgtgaactttgccctgaagaaaaagggcaacgtcacctactacgaggccgaggccaccagcatcaatcccgaccggaacaccgtgaccatcaagagcctgagcgccgtgtcccagctgtaccagcccgagaaccacctgggcctgcaccaggcagagcccgccgaaattaagtacgattacctgatcagcgccgtgggcgccgagcccaacacctttggaattcccggcgtgaccgactacggccacttcctggaggagatccccaacagcctggaaatccggcggaccttcgccgccaacctggaagaggccaacctgctgcctaagggcgaccccgagcggagaaggctgctgagcatcgtggtcgtgggcggaggccccacaggcgtggaagctgctggcgagctgcaggactacgtgcaccaggacctgcggaagttcctgcccgccctggccgaggaagtgcagattcacctggtggaagccctgcccatcgttctgaacatgttcgagaagaagctgagcagctacgcccagtcacacctggaaaacacttccatcaaggtgcacctgagaaccgccgtggccaaggtggaagagaagcagttgctggccaagaccaaacacgaggacggcaagattaccgaggaaaccatcccctacggtactctgatttgggccaccggcaacaaggcaagacccgtgatcaccgaccttttcaagaagatccccgagcagaacagcagcaagcggggcctggcagtgaacgacttcctgcaggtcgagggcagcaacaacatcttcgccatcggcgacaacgcatttgccggcctgcctcctacagcccaggtggcccaccaggaagccgaatacctggccaagaacttcgacaagatggcccagatccccaatttccaaaagaacctgtcctcacggaaggataagatcgacctgctgttcgaggaaaacaacttcaagcccttcaagtacaacgatctgggcgccctggcctacctgggcagcgaaagagccattgccaccatccgtagcggcaagcggaccttctacaccggcggaggcctgatgaccttctacctgtggcggatcctgtacctgagcatgattctgagcgcccgcagcagactgaaggtgttcttcgactggattaagatggccttcttcaagagggactttttcaagggcctgtga

SEQ ID NO: 420 - DNA, 1542 bp, Artificial Sequence
  source: /note="Description of Artificial Sequence: Synthetic polynucleotide"
atgctgagcaagaacttgtacagcaacaagcggctgctgaccagcaccaacacgatggtgcgcttcgccagcaccagatccacaggcgtcgaaaacagcggggctggccccaccagcttcaagaccatgaaggtcatcgacccccagcacagcgacaagcccaacgtgctgatcctgggctctggctggggcgccatcagctttctgaagcacatcgacaccaagaagtacaacgtcagcatcatcagccctagaagctacttcctgcacacccccctgctgcccagcgccccagtgggaaccgtggacgagaagtccatcatcgagcccatcgtgaacttcgccctgaagaaaaagggcaacgttacctactacgaggccgaggccaccagcatcaatcccgaccggaacaccgtgaccatcaagaacctgagcgccgtgagccagctgtaccagcccgagaaccacctgggcctgcaccaggccgagcccgccgagattaagtacgactacctgatcagcgccgtgggcgcggaacccaacacctttggaatccccggcgtgaccgactacggccacttcctgaaagagattcccaacagcctggaaatccggcggaccttcgccgccaacctggagaaggccaacctgttgcctaagggcgaccccgagcggagaaggctgctgagcatcgtggtcgtgggcggaggccccacaggcgtggaagctgctggcgagctgcaggactacgtgcaccaggacctgcggaagttcctgcccgcactggccgaagaagtgcagattcacctggtcgaagccctgcccatcgtgctgaacatgttcgagaagaagctgagcagctacgcccagagccacctggaaaacacctccatcaaggtgcacctgagaaccgccgtggccaaggtggaagagaagcagctgctggccaagaccaagcacgaggacggcaagattaccgaggaaaccatcccctacggcaccctgatttgggccaccggcaacaaggccagacccgtaatcaccgacctgttcaagaagattcctgagcagaacagcagcaagcggggactggccgtgaacgacttcttgcaggtcaaaggcagcaacaacatcttcgccatcggtgacaacgcctttgctggcctgcctcctacagcccaggtggcccaccaggaagccgagtacctggccaagaacttcgacaagatggcccagatccccaatttccagaagaacctgtcctcacggaaggataagatcgacctcctgttcgaggaaaacaacttcaagcccttcaagtacaacgacctgggcgccctggcctacctgggcagcgaaagagccattgccaccatcagatccggcaagcggaccttctacaccggcggaggcctgatgaccttctacctgtggcggatcctgtacctgagcatgatcctgagcgcccgcagcagactgaaggtgttcttcgactggatcaagatggccttcttcaaaagggacttcttcgagggactgtga

SEQ ID NO: 421 - DNA, 1542 bp, Artificial Sequence
  source: /note="Description of Artificial Sequence: Synthetic polynucleotide"
atgctaagcaagaacctgtacagcaaccggcggctgctgacctcgaccaacaccctcgtgcgcttcgccagcaccagatccaccggcgtcgaaaacagcggggctggccccaccagcttcaagaccatgaaggtcatcgacccccagcacagcgacaagccaaacgtgctgatcctgggctctggctggggcgccatcagctttctgaagcacatcgacaccaagaagtacaacgtcagcatcatctctcccagaagctacttcctgcacacccctctgctgcccagcgcacctgtgggaaccgtggacgagaagtccatcatcgagcccatcgtgaatttcgccctgaagaaaaagggcaacgtcacctactacgaggccgaggccaccagcatcaaccccgaccggaacaccgtgaccatcaagagcctgagcgccgtttcccagctgtaccagcccgagaaccacctgggcctgcaccaggccgagcccgccgagattaagtacgactacctgatcagcgccgtgggcgccgagcccaacacctttggtatccccggggtgaccgactacggccacttcctgaaagagatccccaacagcctggaaatccggcggacctttgccgccaacctggaaaaggctaacctgctgcctaagggcgaccccgaacggagaaggctgctgagcatcgtggtggtgggcggaggccccacaggcgtggaagctgctggcgagctgcaggattacgttcaccaggacctgcggaagttcctgcccgccctggccgaggaagtgcagattcacctggtggaagccctgcccatcgtgctgaacatgttcgagaagaagctgagctcatacgcccagtcacacctggaaaacacctcgatcaaggtgcacctgagaaccgccgtggccaaggttgaagagaagcagctgctggccaagaccaagcacgaggacggcaagattaccgaggaaaccatcccctacggcaccctgatttgggccaccggcaacaaggccagacccgtgatcaccgacctgttcaagaaaatccctgagcagaacagcagcaagcggggcctggccgtgaacgactttttgcaggtcaaaggcagcaacaacatcttcgccatcggcgacaacgcctttgccggcctgcctcctacagcccaggtggcccaccaggaagccgagtacctggccaagaactttgacaagatggcccagatcccaaatttccagaagaacctgtcctcccggaaggataagatcgacctgttgttcgaggaaaacaacttcaagcccttcaagtacaacgacttaggcgccctggcctacctgggcagcgaaagagccattgccaccatcagaagcggcaagcggaccttctacaccggcggtggcctgatgaccttctacctgtggcagatcctgtacatgagcatgatcctgagcgcccgcagcagactgaaggtgttcttcgactggatcaagatggccttcttcaagagggacttcttcaagggcctgtga

SEQ ID NO: 422 - DNA, 1542 bp, Artificial Sequence
  source: /note="Description of Artificial Sequence: Synthetic polynucleotide"
atgctgagcaagaacctgtacagcaacaagcggctgctgaccagcaccaacaccctcgtgcgcttcgccagcaccagatccaccggcgtcgaaaacagcggggctggccccaccagcttcaagaccatgaaggtcatcgacccccagcacagcgacaagcccaacgtgctgatcctgggctctggctggggcgccatcagctttctgaagcacatcgacaccaagaagtacaacgtcagcatcatcagccccagaagctacttcctgttcacccccctgctgcccagcgcccctgtgggaaccgtggacgagaagtccatcatcgagcccatcgtgaacttcgccctgaagaaaaagggcaacgtcacctactacgaggccgaggccaccagcatcaaccccgaccggaacaccgtgaccatcaagaacctgagcgccgtgtcccagctgtaccagcccgagaaccacctgggcctgcaccaggccgagcccgccgagattaagtacgactacctgatcagcgccgtgggcgccgagcccaacacctttggaatccccggcgtgaccgactacggccacttcctgaaagagatccccaacagcctggaaatccggcggaccttcgccgccaacctggaaaaggccaacctgctgcctaagggcgaccccgagcggagaaggctgctgagcatcgtggtcgtgggcggaggccccacaggcgtggaagctgctggcgagctgcaggactacgtgcaccaggacctgcggaagttcctgcccgccctggccgaggaagtgcagattcacctggtggaagccctgcccatcgtgctgaacatgttcgagaaggagctgagcagctacgcccagagccacctggaaaacacctccatcaaggtgcacctgagaaccgccgtggccaaggtggaagagaagcagctgctggccaagaccaagcacgaggacggcaagattaccgaggaaaccatcccctacggcaccctgatttgggccaccggcaacaaggccagacccgtgatcaccgacctgttcaagaagatccccgagcagaacagcagcaagcggggcctggccgtgaacgacttcctgcaggtcaaaggcagcaacaacatcttcgccatcggcgacaacgcctttgccggcctgcctcctacagcccaggtggcccaccaggaagccgagtacctggccaagaacttcgacaagatggcccagatccccaatttccagaagaacctgtcctcccggaaggataagatcgacctgctgttcgaggaaaacaacttcaagcccttcaagtacaacgacctgggcgccctggcctacctgggcagcgaaagagccattgccaccatcagaagcggcaagcggaccttctacaccggcggaggcctgatgaccttctacctgtggcagatcctgtacctgagcatgatcctgagcgcccgcagcagactgaaggtgttcttcgactggatcaagatggccttcttcaagagggacttcttcgagggcctgtga

SEQ ID NO: 423 - DNA, 1542 bp, Artificial Sequence
  source: /note="Description of Artificial Sequence: Synthetic polynucleotide"
atgctgagcaagaacctgtacagcaacaagcggctgctgaccagcaccaacaccatggtgcgcttcgccagcaccagatccaccggcgtcgaaaacagcggggctggccccaccagcttcaagaccatgaaggtcatcgacccccagcacagcgacaagcccaacgtgctgatcctgggctctggctggggcgccatcagctttctgaagcacatcgacaccaagaagtacaacgtcagcatcatcagccccagaagctacttcctgttcacccccctgatgcccagcgcccctgtgggaaccgtggacgagaagtccatcatcgagcccatcgtgaacttcgccctgaagaaaaagggcaacgtcacctactacgaggccgaggccaccagcatcaaccccgaccggaacaccgtgaccatcaagagcctgagcgccgtgtcccagctgtaccagcccgagaaccacctgggcctgcaccaggccgagcccgccgagattaagtacgactacctgatcagcgccgtgggcgccgagcccaacacctttggaatccccggcgtgaccgactacggccacttcctgaaagagatccccaacagcctggaaatccggcggaccttcgccgccaacctggaaaaggccaacctgctgcctaagggcgaccccgagcggagaaggctgctgagcatcgtggtcgtgggcggaggccccacaggcgtggaagctgctggcgagctgcaggactacgtgcaccaggacctgcggaagttcctgcccgccctggccgaggaagtgcagattcacctggtggaagccctgcccatcgtgctgaacatgttcgagaaggagctgagcagctacgcccagagccacctggaaaacacctccatcaaggtgcacctgagaaccgccgtggccaaggtggaagagaagcagctgctggccaagaccaagcacgaggacggcaagattaccgaggaaaccatcccctacggcaccctgatttgggccaccggcaacaaggccagacccgtgatcaccgacctgttcaagaagatccccgagcagaacagcagcaagcggggcctggccgtgaacgacttcctgcaggtcaaaggcagcaacaacatcttcgccatcggcgacaacgcctttgccggcctgcctcctacagcccaggtggcccaccaggaagccgagtacctggccaagaacttcgacaagatggcccagatccccaatttccagaagaacctgtcctcccggaaggataagatcgacctgctgttcgaggaaaacaacttcaagcccttcaagtacaacgacctgggcgccctggcctacctgggcagcgaaagagccattgccaccatcagaagcggcaagcggaccttctacaccggcggaggcctgatgaccttctacctgtggcggatcctgtacctgagcatgatcctgagcgcccgcagcagactgaaggtgttcttcgactggatcaagatggccttcttcaagagggacttcttcgagggcctgtga

SEQ ID NO: 424 - DNA, 1542 bp, Artificial Sequence
  source: /note="Description of Artificial Sequence: Synthetic polynucleotide"
atgctgagcaagaacctgtacagcaacaagcggctgctgaccagcaccaacaccatggtgcgcttcgccagcaccagatccaccggcgtcgaaaacagcggggctggccccaccagcttcaagaccatgaaggtcatcgacccccagcacagcgacaagcccaacgtgctgatcctgggctctggctggggcgccatcagctttctgaagcacatcgacaccaagaagtacaacgtcagcatcatcagccccagaaagtacttcctgttcacccccctgctgcccagcgcccctgtgggaaccgtggacgagaagtccatcatcgagcccatcgtgaacttcgccctgaagaaaaagggcaacgtcacctactacgaggccgaggccaccagcatcaaccccgaccggaacaccgtgaccatcaagaacctgagcgccgtgtcccagctgtaccagcccgagaaccacctgggcctgcaccaggccgagcccgccgagattaagtacgactacctgatcagcgccgtgggcgccgagcccaacacctttggaatccccggcgtgaccgactacggccacttcctgaaagagatccccaacagcctggaaatccggcggaccttcgccgccaacctggaaaaggccaacctgctgcctaagggcgaccccgagcggagaaggctgctgagcatcgtggtcgtgggcggaggccccacaggcgtggaagctgctggcgagctgcaggactacgtgcaccaggacctgcggaagttcctgcccgccctggccgaggaagtgcagattcacctggtggaagccctgcccatcgtgctgaacatgttcgagaagaagctgagcagctacgcccagagccacctggaaaacacctccatcaaggtgcacctgagaaccgccgtggccaaggtggaagagaagcagctgctggccaagaccaagcacgaggacggcaagattaccgaggaaaccatcccctacggcaccctgatttgggccaccggcaacaaggccagacccgtgatcaccgacctgttcaagaagatccccgagcagaacagcagcaagcggggcctggccgtgaacgacttcctgcaggtcgagggcagcaacaacatcttcgccatcggcgacaacgcctttgccggcctgcctcctacagcccaggtggcccaccaggaagccgagtacctggccaagaacttcgacaagatggcccagatccccaatttccagaagaacctgtcctcccggaaggataagatcgacctgctgttcgaggaaaacaacttcaagcccttcaagtacaacgacctgggcgccctggcctacctgggcagcgaaagagccattgccaccatcagaagcggcaagcggaccttctacaccggcggaggcctgatgaccttctacctgtggcggatcctgtacatgagcatgatcctgagcgcccgcagcagactgaaggtgttcttcgactggatcaagctggccttcttcaagagggacttcttcaagggcctgtga

SEQ ID NO: 425 - DNA, 1542 bp, Artificial Sequence
  source: /note="Description of Artificial Sequence: Synthetic polynucleotide"
atgctgagcaagaacctgtacagcaacaagcggctgctgaccagcaccaacaccctcgtgcgcttcgccagcaccagatccaccggcgtcgaaaacagcggggctggccccaccagcttcaagaccatgaaggtcatcgacccccagcacagcgacaagcccaacgtgctgatcctgggctctggctggggcgccatcagctttctgaagcacatcgacaccaagaagtacaacgtcagcatcatcagccccagaaagtacttcctgttcacccccctgatgcccagcgcccctgtgggaaccgtggacgagaagtccatcatcgagcccatcgtgaacttcgccctgaagaaaaagggcaacgtcacctactacgaggccgaggccaccagcatcaaccccgaccggaacaccgtgaccatcaagaacctgagcgccgtgtcccagctgtaccagcccgagaaccacctgggcctgcaccaggccgagcccgccgagattaagtacgactacctgatcagcgccgtgggcgccgagcccaacacctttggaatccccggcgtgaccgactacggccacttcctgaaagagatccccaacagcctggaaatccggcggaccttcgccgccaacctggaagaggccaacctgctgcctaagggcgaccccgagcggagaaggctgctgagcatcgtggtcgtgggcggaggccccacaggcgtggaagctgctggcgagctgcaggactacgtgcaccaggacctgcggaagttcctgcccgccctggccgaggaagtgcagattcacctggtggaagccctgcccatcgtgctgaacatgttcgagaagaagctgagcagctacgcccagagccacctggaaaacacctccatcaaggtgcacctgagaaccgccgtggccaaggtggaagagaagcagctgctggccaagaccaagcacgaggacggcaagattaccgaggaaaccatcccctacggcaccctgatttgggccaccggcaacaaggccagacccgtgatcaccgacctgttcaagaagatccccgagcagaacagcagcaagcggggcctggccgtgaacgacttcctgcaggtcaaaggcagcaacaacatcttcgccatcggcgacaacgcctttagcggcctgcctcctacagcccaggtggcccaccaggaagccgagtacctggccaagaacttcgacaagatggcccagatccccaatttccagaagaacctgtcctcccggaaggataagatcgacctgctgttcgaggaaaacaacttcaagcccttcaagtacaacgacctgggcgccctggcctacctgggcagcgaaagagccattgccaccatcagaagcggcaagcggaccttctacaccggcggaggcctgatgaccttctacctgtggcggatcctgtacctgagcatgatcctgagcgcccgcagcagactgaaggtgttcttcgactggatcaagctggccttcttcaagagggacttcttcaagggcctgtga

SEQ ID NO: 426 - DNA, 1542 bp, Artificial Sequence
  source: /note="Description of Artificial Sequence: Synthetic polynucleotide"
atgctgagcaagaacctgtacagcaacaagcggctgctgaccagcaccaacaccctcgtgcgcttcgccagcaccagatccaccggcgtcgaaaacagcggggctggccccaccagcttcaagaccatgaaggtcatcgacccccagcacagcgacaagcccaacgtgctgatcctgggctctggctggggcgccatcagctttctgaagcacatcgacaccaagaagtacaacgtcagcatcatcagccccagaagctacttcctgttcacccccctgatgcccagcgcccctgtgggaaccgtggacgagaagtccatcatcgagcccatcgtgaacttcgccctgaagaaaaagggcaacgtcacctactacgaggccgaggccaccagcatcaaccccgaccggaacaccgtgaccatcaagagcctgagcgccgtgtcccagctgtaccagcccgagaaccacctgggcatgcaccaggccgagcccgccgagattaagtacgactacctgatcagcgccgtgggcgccgagcccaacacctttggaatccccggcgtgaccgactacggccacttcttcaaagagatccccaacagcctggaaatccggcggaccttcgccgccaacctggaaaaggccaacctgctgcctaagggcgaccccgagcggagaaggctgctgagcatcgtggtcgtgggcggaggccccacaggcgtggaagctgctggcgagctgcaggactacgtgcaccaggacctgcggaagttcctgcccgccctggccgaggaagtgcagattcacctggtggaagccctgcccatcgtgctgaacatgttcgagaagaagctgagcagctacgcccagagccacctggaaaacacctccatcaaggtgcacctgagaaccgccgtggccaaggtggaagagaagcagctgctggccaagaccaagcacgaggacggcaagattaccgaggaaaccatcccctacggcaccctgatttgggccaccggcaacaaggccagacccgtgatcaccgacctgttcaagaagatccccgagcagaacagcagcaagcggggcctggccgtgaacgacttcctgcaggtcaaaggcagcaacaacatcttcgccatcggcgacaacgcctttgccggcctgcctcctacagcccaggtggcccaccaggaagccgagtacatcgccaagaacttcgacaagatggcccagatccccaatttccagaagaacctgtcctcccggaaggataagatcgacctgctgttcgaggaaaacaacttcaagcccttcaagtacaacgacctgggcgccctggcctacctgggcagcgaaagagccattgccaccatcagaagcggcaagcggaccttctacaccggcggaggcctgatgaccttctacctgtggcggatcctgtacctgagcatgatcctgagcgcccgcagcagactgaaggtgttcttcgactggatcaagctggccttcttcaagagggacttcttcgagggcctgtga

SEQ ID NO: 427 - DNA, 1542 bp, Artificial Sequence
  source: /note="Description of Artificial Sequence: Synthetic polynucleotide"
atgctgagcaagaacctgtacagcaaccggcggctgctgaccagcaccaacaccatggtgcgcttcgccagcaccagatccaccggcgtcgaaaacagcggggctggccccaccagcttcaagaccatgaaggtcatcgacccccagcacagcgacaagcccaacgtgctgatcctgggctctggctggggcgccatcagctttctgaagcacatcgacaccaagaagtacaacgtcagcatcatcagccccagaaagtacttcctgttcacccccctgatgcccagcgcccctgtgggaaccgtggacgagaagtccatcatcgagcccatcgtgaacttcgccctgaagaaaaagggcaacgtcacctactacgaggccgaggccaccagcatcaaccccgaccggaacaccgtgaccatcaagagcctgagcgccgtgtcccagctgtaccagcccgagaaccacctgggcctgcaccaggccgagcccgccgagattaagtacgactacctgatcagcgccgtgggcgccgagcccaacacctttggaatccccggcgtgaccgactacggccacttcctgaaagagatccccaacagcctggaaatccggcggaccttcgccgccaacctggaaaaggccaacctgctgcctaagggcgaccccgagcggagaaggctgctgagcatcgtggtcgtgggcggaggccccacaggcgtggaagctgctggcgagctgcaggactacgtgcaccaggacctgcggaagttcctgcccgccctggccgaggaagtgcagattcacctggtggaagccctgcccatcgtgctgaacatgttcgagaaggagctgagcagctacgcccagagccacctggaaaacacctccatcaaggtgcacctgagaaccgccgtggccaaggtggaagagaagcagctgctggccaagaccaagcacgaggacggcaagattaccgaggaaaccatcccctacggcaccctgatttgggccaccggcaacaaggccagacccgtgatcaccgacctgttcaagaagatccccgagcagaacagcagcaagcggggcctggccgtgaacgacttcctgcaggtcaaaggcagcaacaacatcttcgccatcggcgacaacgcctttgccggcctgcctcctacagcccaggtggcccaccaggaagccgagtacctggccaagaacttcgacaagatggcccagatccccaatttccagaagaacctgtcctcccggaaggataagatcgacctgctgttcgaggaaaacaacttcaagcccttcaagtacaacgacctgggcgccctggcctacctgggcagcgaaagagccattgccaccatcagaagcggcaagcggaccttctacaccggcggaggcctgatgaccttctacctgtggcggatcctgtacctgagcatgatcctgagcgcccgcagcagactgaaggtgttcttcgactggatcaagctggccttcttcaagagggacttcttcaagggcctgtga

SEQ ID NO: 428 - DNA, 1542 bp, Artificial Sequence
  source: /note="Description of Artificial Sequence: Synthetic polynucleotide"
atgctgagcaagaacctgtacagcaacaagcggctgctgaccagcaccaacaccctcgtgcgcttcgccagcaccagatccaccggcgtcgaaaacagcggggctggccccaccagcttcaagaccatgaaggtcatcgacccccagcacagcgacaagcccaacgtgctgatcctgggctctggctggggcgccatcagctttctgaagcacatcgacaccaagaagtacaacgtcagcatcatcagccccagaagctacttcctgttcacccccctgctgcccagcgcccctgtgggaaccgtggacgagaagtccatcatcgagcccatcgtgaacttcgccctgaagaaaaagggcaacgtcacctactacgaggccgaggccaccagcatcaaccccgaccggaacaccgtgaccatcaagagcctgagcgccgtgtcccagctgtaccagcccgagaaccacctgggcatgcaccaggccgagcccgccgagattaagtacgactacctgatcagcgccgtgggcgccgagcccaacacctttggaatccccggcgtgaccgactacggccacttcctgaaagagatccccaacagcctggaaatccggcggaccttcgccgccaacctggaaaaggccaacctgctgcctaagggcgaccccgagcggagaaggctgctgagcatcgtggtcgtgggcggaggccccacaggcgtggaagctgctggcgagctgcaggactacgtgcaccaggacctgcggaagttcctgcccgccctggccgaggaagtgcagattcacctggtggaagccctgcccatcgtgctgaacatgttcgagaaggagctgagcagctacgcccagagccacctggaaaacacctccatcaaggtgcacctgagaaccgccgtggccaaggtggaagagaagcagctgctggccaagaccaagcacgaggacggcaagattaccgaggaaaccatcccctacggcaccctgatttgggccaccggcaacaaggccagacccgtgatcaccgacctgttcaagaagatccccgagcagaacagcagcaagcggggcctggccgtgaacgacttcctgcaggtcaaaggcagcaacaacatcttcgccatcggcgacaacgcctttagcggcctgcctcctacagcccaggtggcccaccaggaagccgagtacctggccaagaacttcgacaagatggcccagatccccaatttccagaagaacctgtcctcccggaaggataagatcgacctgctgttcgaggaaaacaacttcaagcccttcaagtacaacgacctgggcgccctggcctacctgggcagcgaaagagccattgccaccatcagaagcggcaagcggaccttctacaccggcggaggcctgatgaccttctacctgtggcggatcctgtacctgagcatgatcctgagcgcccgcagcagactgaaggtgttcttcgactggatcaagatggccttcttcaagagggacttcttcgagggcctgtga

SEQ ID NO: 429 - DNA, 1542 bp, Artificial Sequence
  source: /note="Description of Artificial Sequence: Synthetic polynucleotide"
atgctgagcaagaacctgtacagcaaccggcggctgctgaccagcaccaacaccatggtgcgcttcgccagcaccagatccaccggcgtcgaaaacagcggggctggccccaccagcttcaagaccatgaaggtcatcgacccccagcacagcgacaagcccaacgtgctgatcctgggctctggctggggcgccatcagctttctgaagcacatcgacaccaagaagtacaacgtcagcatcatcagccccagaagctacttcctgcacacccccctgatgcccagcgcccctgtgggaaccgtggacgagaagtccatcatcgagcccatcgtgaacttcgccctgaagaaaaagggcaacgtcacctactacgaggccgaggccaccagcatcaaccccgaccggaacaccgtgaccatcaagagcctgagcgccgtgtcccagctgtaccagcccgagaaccacctgggcctgcaccaggccgagcccgccgagattaagtacgactacctgatcagcgccgtgggcgccgagcccaacacctttggaatccccggcgtgaccgactacggccacttcctgaaagagatccccaacagcctggaaatccggcggaccttcgccgccaacctggaaaaggccaacctgctgcctaagggcgaccccgagcggagaaggctgctgagcatcgtggtcgtgggcggaggccccacaggcgtggaagctgctggcgagctgcaggactacgtgcaccaggacctgcggaagttcttccccgccctggccgaggaagtgcagattcacctggtggaagccctgcccatcgtgctgaacatgttcgagaagaagctgagcagctacgcccagagccacctggaaaacacctccatcaaggtgcacctgagaaccgccgtggccaaggtggaagagaagcagctgctggccaagaccaagcacgaggacggcaagattaccgaggaaaccatcccctacggcaccctgatttgggccaccggcaacaaggccagacccgtgatcaccgacctgttcaagaagatccccgagcagaacagcagcaagcggggcctggccgtgaacgacttcctgcaggtcaaaggcagcaacaacatcttcgccatcggcgacaacgcctttgccggcctgcctcctacagcccaggtggcccaccaggaagccgagtacctggccaagaacttcgacaagatggcccagatccccaatttccagaagaacctgtcctcccggaaggataagatcgacctgctgttcgaggaaaacaacttcaagcccttcaagtacaacgacctgggcgccctggcctacctgggcagcgaaagagccattgccaccatcagaagcggcaagcggaccttctacaccggcggaggcctgatgaccttctacctgtggcggatcctgtacctgagcatgatcctgagcgcccgcagcagactgaaggtgttcttcgactggatcaagctggccttcttcaagagggacttcttcaagggcctgtga

SEQ ID NO: 430 - DNA, 1542 bp, Artificial Sequence
  source: /note="Description of Artificial Sequence: Synthetic polynucleotide"
atgctgagcaagaacctgtacagcaacaagcggctgctgaccagcaccaacaccatggtgcgcttcgccagcaccagatccaccggcgtcgaaaacagcggggctggccccaccagcttcaagaccatgaaggtcatcgacccccagcacagcgacaagcccaacgtgctgatcctgggctctggctggggcgccatcagctttctgaagcacatcgacaccaagaagtacaacgtcagcatcatcagccccagaagctacttcctgttcacccccctgatgcccagcgcccctgtgggaaccgtggacgagaagtccatcatcgagcccatcgtgaacttcgccctgaagaaaaagggcaacgtcacctactacgaggccgaggccaccagcatcaaccccgaccggaacaccgtgaccatcaagagcctgagcgccgtgtcccagctgtaccagcccgagaaccacctgggcatgcaccaggccgagcccgccgagattaagtacgactacctgatcagcgccgtgggcgccgagcccaacacctttggaatccccggcgtgaccgactacggccacttcctgaaagagatccccaacagcctggaaatccggcggaccttcgccgccaacctggaagaggccaacctgctgcctaagggcgaccccgagcggagaaggctgctgagcatcgtggtcgtgggcggaggccccacaggcgtggaagctgctggcgagctgcaggactacgtgcaccaggacctgcggaagttcctgcccgccctggccgaggaagtgcagattcacctggtggaagccctgcccatcgtgctgaacatgttcgagaagaagctgagcagctacgcccagagccacctggaaaacacctccatcaaggtgcacctgagaaccgccgtggccaaggtggaagagaagcagctgctggccaagaccaagcacgaggacggcaagattaccgaggaaaccatcccctacggcaccctgatttgggccaccggcaacaaggccagacccgtgatcaccgacctgttcaagaagatccccgagcagaacagcagcaagcggggcctggccgtgaacgacttcctgcaggtcaaaggcagcaacaacatcttcgccatcggcgacaacgcctttgccggcctgcctcctacagcccaggtggcccaccaggaagccgagtacctggccaagaacttcgacaagatggcccagatccccaatttccagaagaacctgtcctcccggaaggataagatcgacctgctgttcgaggaaaacaacttcaagcccttcaagtacaacgacctgggcgccctggcctacctgggcagcgaaagagccattgccaccatcagaagcggcaagcggaccttctacaccggcggaggcctgatgaccttctacctgtggcggatcctgtacatgagcatgatcctgagcgcccgcagcagactgaaggtgttcttcgactggatcaagctggccttcttcaagagggacttcttcaagggcctgtga

SEQ ID NO: 431 - DNA, 1542 bp, Artificial Sequence
  source: /note="Description of Artificial Sequence: Synthetic polynucleotide"
atgctgagcaagaacctgtacagcaacaagcggctgctgaccagcaccaacaccctcgtgcgcttcgccagcaccagatccaccggcgtcgaaaacagcggggctggccccaccagcttcaagaccatgaaggtcatcgacccccagcacagcgacaagcccaacgtgctgatcctgggctctggctggggcgccatcagctttctgaagcacatcgacaccaagaagtacaacgtcagcatcatcagccccagaaagtacttcctgcacacccccctgctgcccagcgcccctgtgggaaccgtggacgagaagtccatcatcgagcccatcgtgaacttcgccctgaagaaaaagggcaacgtcacctactacgaggccgaggccaccagcatcaaccccgaccggaacaccgtgaccatcaagagcctgagcgccgtgtcccagctgtaccagcccgagaaccacctgggcctgcaccaggccgagcccgccgagattaagtacgactacctgatcagcgccgtgggcgccgagcccaacacctttggaatccccggcgtgaccgactacggccacttcctgaaagagatccccaacagcctggaaatccggcggaccttcgccgccaacctggaaaaggccaacctgctgcctaagggcgaccccgagcggagaaggctgctgagcatcgtggtcgtgggcggaggccccacaggcgtggaagctgctggcgagctgcaggactacgtgcaccaggacctgcggaagttcctgcccgccctggccgaggaagtgcagattcacctggtggaagccctgcccatcgtgctgaacatgttcgagaaggagctgagcagctacgcccagagccacctggaaaacacctccatcaaggtgcacctgagaaccgccgtggccaaggtggaagagaagcagctgctggccaagaccaagcacgaggacggcaagattaccgaggaaaccatcccctacggcaccctgatttgggccaccggcaacaaggccagacccgtgatcaccgacctgttcaagaagatccccgagcagaacagcagcaagcggggcctggccgtgaacgacttcctgcaggtcaaaggcagcaacaacatcttcgccatcggcgacaacgcctttgccggcctgcctcctacagcccaggtggcccaccaggaagccgagtacatcgccaagaacttcgacaagatggcccagatccccaatttccagaagaacctgtcctcccggaaggataagatcgacctgctgttcgaggaaaacaacttcaagcccttcaagtacaacgacctgggcgccctggcctacctgggcagcgaaagagccattgccaccatcagaagcggcaagcggaccttctacaccggcggaggcctgatgaccttctacctgtggcggatcctgtacctgagcatgatcctgagcgcccgcagcagactgaaggtgttcttcgactggatcaagctggccttcttcaagagggacttcttcgagggcctgtga

SEQ ID NO: 432 - DNA, 1542 bp, Artificial Sequence
  source: /note="Description of Artificial Sequence: Synthetic polynucleotide"
atgctgagcaagaacctgtacagcaaccggcggctgctgaccagcaccaacaccctcgtgcgcttcgccagcaccagatccaccggcgtcgaaaacagcggggctggccccaccagcttcaagaccatgaaggtcatcgacccccagcacagcgacaagcccaacgtgctgatcctgggctctggctggggcgccatcagctttctgaagcacatcgacaccaagaagtacaacgtcagcatcatcagccccagaaagtacttcctgttcacccccctgatgcccagcgcccctgtgggaaccgtggacgagaagtccatcatcgagcccatcgtgaacttcgccctgaagaaaaagggcaacgtcacctactacgaggccgaggccaccagcatcaaccccgaccggaacaccgtgaccatcaagagcctgagcgccgtgtcccagctgtaccagcccgagaaccacctgggcatgcaccaggccgagcccgccgagattaagtacgactacctgatcagcgccgtgggcgccgagcccaacacctttggaatccccggcgtgaccgactacggccacttcctgaaagagatccccaacagcctggaaatccggcggaccttcgccgccaacctggaaaaggccaacctgctgcctaagggcgaccccgagcggagaaggctgctgagcatcgtggtcgtgggcggaggccccacaggcgtggaagctgctggcgagctgcaggactacgtgcaccaggacctgcggaagttcctgcccgccctggccgaggaagtgcagattcacctggtggaagccctgcccatcgtgctgaacatgttcgagaagaagctgagcagctacgcccagagccacctggaaaacacctccatcaaggtgcacctgagaaccgccgtggccaaggtggaagagaagcagctgctggccaagaccaagcacgaggacggcaagattaccgaggaaaccatcccctacggcaccctgatttgggccaccggcaacaaggccagacccgtgatcaccgacctgttcaagaagatccccgagcagaacagcagcaagcggggcctggccgtgaacgacttcctgcaggtcaaaggcagcaacaacatcttcgccatcggcgacaacgcctttgccggcctgcctcctacagcccaggtggcccaccaggaagccgagtacatcgccaagaacttcgacaagatggcccagatccccaatttccagaagaacctgtcctcccggaaggataagatcgacctgctgttcgaggaaaacaacttcaagcccttcaagtacaacgacctgggcgccctggcctacctgggcagcgaaagagccattgccaccatcagaagcggcaagcggaccttctacaccggcggaggcctgatgaccttctacctgtggcggatcctgtacctgagcatgatcctgagcgcccgcagcagactgaaggtgttcttcgactggatcaagctggccttcttcaagagggacttcttcaagggcctgtga

SEQ ID NO: 433 - DNA, 1542 bp, Artificial Sequence
  source: /note="Description of Artificial Sequence: Synthetic polynucleotide"
atgctgagcaagaacctgtacagcaacaagcggctgctgaccagcaccaacaccctcgtgcgcttcgccagcaccagatccaccggcgtcgaaaacagcggggctggccccaccagcttcaagaccatgaaggtcatcgacccccagcacagcgacaagcccaacgtgctgatcctgggctctggctggggcgccatcagctttctgaagcacatcgacaccaagaagtacaacgtcagcatcatcagccccagaagctacttcctgcacacccccctgctgcccagcgcccctgtgggaaccgtggacgagaagtccatcatcgagcccatcgtgaacttcgccctgaagaaaaagggcaacgtcacctactacgaggccgaggccaccagcatcaaccccgaccggaacaccgtgaccatcaagagcctgagcgccgtgtcccagctgtaccagcccgagaaccacctgggcatgcaccaggccgagcccgccgagattaagtacgactacctgatcagcgccgtgggcgccgagcccaacacctttggaatccccggcgtgaccgactacggccacttcctggaggagatccccaacagcctggaaatccggcggaccttcgccgccaacctggaaaaggccaacctgctgcctaagggcgaccccgagcggagaaggctgctgagcatcgtggtcgtgggcggaggccccacaggcgtggaagctgctggcgagctgcaggactacgtgcaccaggacctgcggaagttcctgcccgccctggccgaggaagtgcagattcacctggtggaagccctgcccatcgtgctgaacatgttcgagaagaagctgagcagctacgcccagagccacctggaaaacacctccatcaaggtgcacctgagaaccgccgtggccaaggtggaagagaagcagctgctggccaagaccaagcacgaggacggcaagattaccgaggaaaccatcccctacggcaccctgatttgggccaccggcaacaaggccagacccgtgatcaccgacctgttcaagaagatccccgagcagaacagcagcaagcggggcctggccgtgaacgacttcctgcaggtcgagggcagcaacaacatcttcgccatcggcgacaacgcctttgccggcctgcctcctacagcccaggtggcccaccaggaagccgagtacctggccaagaacttcgacaagatggcccagatccccaatttccagaagaacctgtcctcccggaaggataagatcgacctgctgttcgaggaaaacaacttcaagcccttcaagtacaacgacctgggcgccctggcctacctgggcagcgaaagagccattgccaccatcagaagcggcaagcggaccttctacaccggcggaggcctgatgaccttctacctgtggcggatcctgtacctgagcatgatcctgagcgcccgcagcagactgaaggtgttcttcgactggatcaagctggccttcttcaagagggacttcttcgagggcctgtga

SEQ ID NO: 434 - DNA, 1542 bp, Artificial Sequence
  source: /note="Description of Artificial Sequence: Synthetic polynucleotide"
atgctgagcaagaacctgtacagcaacaagcggctgctgaccagcaccaacaccctcgtgcgcttcgccagcaccagatccaccggcgtcgaaaacagcggggctggccccaccagcttcaagaccatgaaggtcatcgacccccagcacagcgacaagcccaacgtgctgatcctgggctctggctggggcgccatcagctttctgaagcacatcgacaccaagaagtacaacgtcagcatcatcagccccagaagctacttcctgttcacccccctgctgcccagcgcccctgtgggaaccgtggacgagaagtccatcatcgagcccatcgtgaacttcgccctgaagaaaaagggcaacgtcacctactacgaggccgaggccaccagcatcaaccccgaccggaacaccgtgaccatcaagagcctgagcgccgtgtcccagctgtaccagcccgagaaccacctgggcatgcaccaggccgagcccgccgagattaagtacgactacctgatcagcgccgtgggcgccgagcccaacacctttggaatccccggcgtgaccgactacggccacttcctggaggagatccccaacagcctggaaatccggcggaccttcgccgccaacctggaaaaggccaacctgctgcctaagggcgaccccgagcggagaaggctgctgagcatcgtggtcgtgggcggaggccccacaggcgtggaagctgctggcgagctgcaggactacgtgcaccaggacctgcggaagttcttccccgccctggccgaggaagtgcagattcacctggtggaagccctgcccatcgtgctgaacatgttcgagaagaagctgagcagctacgcccagagccacctggaaaacacctccatcaaggtgcacctgagaaccgccgtggccaaggtggaagagaagcagctgctggccaagaccaagcacgaggacggcaagattaccgaggaaaccatcccctacggcaccctgatttgggccaccggcaacaaggccagacccgtgatcaccgacctgttcaagaagatccccgagcagaacagcagcaagcggggcctggccgtgaacgacttcctgcaggtcgagggcagcaacaacatcttcgccatcggcgacaacgcctttgccggcctgcctcctacagcccaggtggcccaccaggaagccgagtacatcgccaagaacttcgacaagatggcccagatccccaatttccagaagaacctgtcctcccggaaggataagatcgacctgctgttcgaggaaaacaacttcaagcccttcaagtacaacgacctgggcgccctggcctacctgggcagcgaaagagccattgccaccatcagaagcggcaagcggaccttctacaccggcggaggcctgatgaccttctacctgtggcggatcctgtacctgagcatgatcctgagcgcccgcagcagactgaaggtgttcttcgactggatcaagctggccttcttcaagagggacttcttcaagggcctgtga

SEQ ID NO: 435 - DNA, 1542 bp, Artificial Sequence
  source: /note="Description of Artificial Sequence: Synthetic polynucleotide"
atgctgagcaagaacctgtacagcaaccggcggctgctgaccagcaccaacaccctcgtgcgcttcgccagcaccagatccaccggcgtcgaaaacagcggggctggccccaccagcttcaagaccatgaaggtcatcgacccccagcacagcgacaagcccaacgtgctgatcctgggctctggctggggcgccatcagctttctgaagcacatcgacaccaagaagtacaacgtcagcatcatcagccccagaagctacttcctgcacacccccctgctgcccagcgcccctgtgggaaccgtggacgagaagtccatcatcgagcccatcgtgaacttcgccctgaagaaaaagggcaacgtcacctactacgaggccgaggccaccagcatcaaccccgaccggaacaccgtgaccatcaagaacctgagcgccgtgtcccagctgtaccagcccgagaaccacctgggcatgcaccaggccgagcccgccgagattaagtacgactacctgatcagcgccgtgggcgccgagcccaacacctttggaatccccggcgtgaccgactacggccacttcctgaaagagatccccaacagcctggaaatccggcggaccttcgccgccaacctggaaaaggccaacctgctgcctaagggcgaccccgagcggagaaggctgctgagcatcgtggtcgtgggcggaggccccacaggcgtggaagctgctggcgagctgcaggactacgtgcaccaggacctgcggaagttcctgcccgccctggccgaggaagtgcagattcacctggtggaagccctgcccatcgtgctgaacatgttcgagaaggagctgagcagctacgcccagagccacctggaaaacacctccatcaaggtgcacctgagaaccgccgtggccaaggtggaagagaagcagctgctggccaagaccaagcacgaggacggcaagattaccgaggaaaccatcccctacggcaccctgatttgggccaccggcaacaaggccagacccgtgatcaccgacctgttcaagaagatccccgagcagaacagcagcaagcggggcctggccgtgaacgacttcctgcaggtcaaaggcagcaacaacatcttcgccatcggcgacaacgcctttgccggcctgcctcctacagcccaggtggcccaccaggaagccgagtacctggccaagaacttcgacaagatggcccagatccccaatttccagaagaacctgtcctcccggaaggataagatcgacctgctgttcgaggaaaacaacttcaagcccttcaagtacaacgacctgggcgccctggcctacctgggcagcgaaagagccattgccaccatcagaagcggcaagcggaccttctacaccggcggaggcctgatgaccttctacctgtggcggatcctgtacctgagcatgatcctgagcgcccgcagcagactgaaggtgttcttcgactggatcaagctggccttcttcaagagggacttcttcaagggcctgtga

SEQ ID NO: 436 - DNA, 1542 bp, Artificial Sequence
  source: /note="Description of Artificial Sequence: Synthetic polynucleotide"
atgctgagcaagaacctgtacagcaaccggcggctgctgaccagcaccaacaccctcgtgcgcttcgccagcaccagatccaccggcgtcgaaaacagcggggctggccccaccagcttcaagaccatgaaggtcatcgacccccagcacagcgacaagcccaacgtgctgatcctgggctctggctggggcgccatcagctttctgaagcacatcgacaccaagaagtacaacgtcagcatcatcagccccagaagctacttcctgttcacccccctgctgcccagcgcccctgtgggaaccgtggacgagaagtccatcatcgagcccatcgtgaacttcgccctgaagaaaaagggcaacgtcacctactacgaggccgaggccaccagcatcaaccccgaccggaacaccgtgaccatcaagagcctgagcgccgtgtcccagctgtaccagcccgagaaccacctgggcctgcaccaggccgagcccgccgagattaagtacgactacctgatcagcgccgtgggcgccgagcccaacacctttggaatccccggcgtgaccgactacggccacttcttcaaagagatccccaacagcctggaaatccggcggaccttcgccgccaacctggaagaggccaacctgctgcctaagggcgaccccgagcggagaaggctgctgagcatcgtggtcgtgggcggaggccccacaggcgtggaagctgctggcgagctgcaggactacgtgcaccaggacctgcggaagttcttccccgccctggccgaggaagtgcagattcacctggtggaagccctgcccatcgtgctgaacatgttcgagaagaagctgagcagctacgcccagagccacctggaaaacacctccatcaaggtgcacctgagaaccgccgtggccaaggtggaagagaagcagctgctggccaagaccaagcacgaggacggcaagattaccgaggaaaccatcccctacggcaccctgatttgggccaccggcaacaaggccagacccgtgatcaccgacctgttcaagaagatccccgagcagaacagcagcaagcggggcctggccgtgaacgacttcctgcaggtcaaaggcagcaacaacatcttcgccatcggcgacaacgcctttgccggcctgcctcctacagcccaggtggcccaccaggaagccgagtacatcgccaagaacttcgacaagatggcccagatccccaatttccagaagaacctgtcctcccggaaggataagatcgacctgctgttcgaggaaaacaacttcaagcccttcaagtacaacgacctgggcgccctggcctacctgggcagcgaaagagccattgccaccatcagaagcggcaagcggaccttctacaccggcggaggcctgatgaccttctacctgtggcggatcctgtacctgagcatgatcctgagcgcccgcagcagactgaaggtgttcttcgactggatcaagctggccttcttcaagagggacttcttcaagggcctgtga

SEQ ID NO: 437 - DNA, 1542 bp, Artificial Sequence
  source: /note="Description of Artificial Sequence: Synthetic polynucleotide"
atgctgagcaagaacctgtacagcaaccggcggctgctgaccagcaccaacaccctcgtgcgcttcgccagcaccagatccaccggcgtcgaaaacagcggggctggccccaccagcttcaagaccatgaaggtcatcgacccccagcacagcgacaagcccaacgtgctgatcctgggctctggctggggcgccatcagctttctgaagcacatcgacaccaagaagtacaacgtcagcatcatcagccccagaagctacttcctgcacacccccctgctgcccagcgcccctgtgggaaccgtggacgagaagtccatcatcgagcccatcgtgaacttcgccctgaagaaaaagggcaacgtcacctactacgaggccgaggccaccagcatcaaccccgaccggaacaccgtgaccatcaagagcctgagcgccgtgtcccagctgtaccagcccgagaaccacctgggcctgcaccaggccgagcccgccgagattaagtacgactacctgatcagcgccgtgggcgccgagcccaacacctttggaatccccggcgtgaccgactacggccacttcctggaggagatccccaacagcctggaaatccggcggaccttcgccgccaacctggaaaaggccaacctgctgcctaagggcgaccccgagcggagaaggctgctgagcatcgtggtcgtgggcggaggccccacaggcgtggaagctgctggcgagctgcaggactacgtgcaccaggacctgcggaagttcttccccgccctggccgaggaagtgcagattcacctggtggaagccctgcccatcgtgctgaacatgttcgagaagaagctgagcagctacgcccagagccacctggaaaacacctccatcaaggtgcacctgagaaccgccgtggccaaggtggaagagaagcagctgctggccaagaccaagcacgaggacggcaagattaccgaggaaaccatcccctacggcaccctgatttgggccaccggcaacaaggccagacccgtgatcaccgacctgttcaagaagatccccgagcagaacagcagcaagcggggcctggccgtgaacgacttcctgcaggtcgagggcagcaacaacatcttcgccatcggcgacaacgcctttgccggcctgcctcctacagcccaggtggcccaccaggaagccgagtacctggccaagaacttcgacaagatggcccagatccccaatttccagaagaacctgtcctcccggaaggataagatcgacctgctgttcgaggaaaacaacttcaagcccttcaagtacaacgacctgggcgccctggcctacctgggcagcgaaagagccattgccaccatcagaagcggcaagcggaccttctacaccggcggaggcctgatgaccttctacctgtggcggatcctgtacctgagcatgatcctgagcgcccgcagcagactgaaggtgttcttcgactggatcaagctggccttcttcaagagggacttcttcaagggcctgtga

SEQ ID NO: 438 - DNA, 1542 bp, Artificial Sequence
  source: /note="Description of Artificial Sequence: Synthetic polynucleotide"
atgctgagcaagaacctgtacagcaacaagcggctgctgaccagcaccaacaccatggtgcgcttcgccagcaccagatccaccggcgtcgaaaacagcggggctggccccaccagcttcaagaccatgaaggtcatcgacccccagcacagcgacaagcccaacgtgctgatcctgggctctggctggggcgccatcagctttctgaagcacatcgacaccaagaagtacaacgtcagcatcatcagccccagaaagtacttcctgttcacccccctgctgcccagcgcccctgtgggaaccgtggacgagaagtccatcatcgagcccatcgtgaacttcgccctgaagaaaaagggcaacgtcacctactacgaggccgaggccaccagcatcaaccccgaccggaacaccgtgaccatcaagaacctgagcgccgtgtcccagctgtaccagcccgagaaccacctgggcatgcaccaggccgagcccgccgagattaagtacgactacctgatcagcgccgtgggcgccgagcccaacacctttggaatccccggcgtgaccgactacggccacttcctggaggagatccccaacagcctggaaatccggcggaccttcgccgccaacctggaaaaggccaacctgctgcctaagggcgaccccgagcggagaaggctgctgagcatcgtggtcgtgggcggaggccccacaggcgtggaagctgctggcgagctgcaggactacgtgcaccaggacctgcggaagttcctgcccgccctggccgaggaagtgcagattcacctggtggaagccctgcccatcgtgctgaacatgttcgagaagaagctgagcagctacgcccagagccacctggaaaacacctccatcaaggtgcacctgagaaccgccgtggccaaggtggaagagaagcagctgctggccaagaccaagcacgaggacggcaagattaccgaggaaaccatcccctacggcaccctgatttgggccaccggcaacaaggccagacccgtgatcaccgacctgttcaagaagatccccgagcagaacagcagcaagcggggcctggccgtgaacgacttcctgcaggtcaaaggcagcaacaacatcttcgccatcggcgacaacgcctttgccggcctgcctcctacagcccaggtggcccaccaggaagccgagtacctggccaagaacttcgacaagatggcccagatccccaatttccagaagaacctgtcctcccggaaggataagatcgacctgctgttcgaggaaaacaacttcaagcccttcaagtacaacgacctgggcgccctggcctacctgggcagcgaaagagccattgccaccatcagaagcggcaagcggaccttctacaccggcggaggcctgatgaccttctacctgtggcggatcctgtacctgagcatgatcctgagcgcccgcagcagactgaaggtgttcttcgactggatcaagctggccttcttcaagagggacttcttcaagggcctgtga

SEQ ID NO: 439 - DNA, 1542 bp, Artificial Sequence
  source: /note="Description of Artificial Sequence: Synthetic polynucleotide"
atgctgagcaagaacctgtacagcaacaagcggctgctgaccagcaccaacaccctcgtgcgcttcgccagcaccagatccaccggcgtcgaaaacagcggggctggccccaccagcttcaagaccatgaaggtcatcgacccccagcacagcgacaagcccaacgtgctgatcctgggctctggctggggcgccatcagctttctgaagcacatcgacaccaagaagtacaacgtcagcatcatcagccccagaagctacttcctgcacacccccctgctgcccagcgcccctgtgggaaccgtggacgagaagtccatcatcgagcccatcgtgaacttcgccctgaagaaaaagggcaacgtcacctactacgaggccgaggccaccagcatcaaccccgaccggaacaccgtgaccatcaagaacctgagcgccgtgtcccagctgtaccagcccgagaaccacctgggcctgcaccaggccgagcccgccgagattaagtacgactacctgatcagcgccgtgggcgccgagcccaacacctttggaatccccggcgtgaccgactacggccacttcctgaaagagatccccaacagcctggaaatccggcggaccttcgccgccaacctggaaaaggccaacctgctgcctaagggcgaccccgagcggagaaggctgctgagcatcgtggtcgtgggcggaggccccacaggcgtggaagctgctggcgagctgcaggactacgtgcaccaggacctgcggaagttcttccccgccctggccgaggaagtgcagattcacctggtggaagccctgcccatcgtgctgaacatgttcgagaagaagctgagcagctacgcccagagccacctggaaaacacctccatcaaggtgcacctgagaaccgccgtggccaaggtggaagagaagcagctgctggccaagaccaagcacgaggacggcaagattaccgaggaaaccatcccctacggcaccctgatttgggccaccggcaacaaggccagacccgtgatcaccgacctgttcaagaagatccccgagcagaacagcagcaagcggggcctggccgtgaacgacttcctgcaggtcaaaggcagcaacaacatcttcgccatcggcgacaacgcctttgccggcctgcctcctacagcccaggtggcccaccaggaagccgagtacatcgccaagaacttcgacaagatggcccagatccccaatttccagaagaacctgtcctcccggaaggataagatcgacctgctgttcgaggaaaacaacttcaagcccttcaagtacaacgacctgggcgccctggcctacctgggcagcgaaagagccattgccaccatcagaagcggcaagcggaccttctacaccggcggaggcctgatgaccttctacctgtggcggatcctgtacatgagcatgatcctgagcgcccgcagcagactgaaggtgttcttcgactggatcaagctggccttcttcaagagggacttcttcaagggcctgtga

SEQ ID NO: 440 - DNA, 1542 bp, Artificial Sequence
  source: /note="Description of Artificial Sequence: Synthetic polynucleotide"
atgctgagcaagaacctgtacagcaaccggcggctgctgaccagcaccaacaccctcgtgcgcttcgccagcaccagatccaccggcgtcgaaaacagcggggctggccccaccagcttcaagaccatgaaggtcatcgacccccagcacagcgacaagcccaacgtgctgatcctgggctctggctggggcgccatcagctttctgaagcacatcgacaccaagaagtacaacgtcagcatcatcagccccagaaagtacttcctgttcacccccctgatgcccagcgcccctgtgggaaccgtggacgagaagtccatcatcgagcccatcgtgaacttcgccctgaagaaaaagggcaacgtcacctactacgaggccgaggccaccagcatcaaccccgaccggaacaccgtgaccatcaagaacctgagcgccgtgtcccagctgtaccagcccgagaaccacctgggcctgcaccaggccgagcccgccgagattaagtacgactacctgatcagcgccgtgggcgccgagcccaacacctttggaatccccggcgtgaccgactacggccacttcctgaaagagatccccaacagcctggaaatccggcggaccttcgccgccaacctggaaaaggccaacctgctgcctaagggcgaccccgagcggagaaggctgctgagcatcgtggtcgtgggcggaggccccacaggcgtggaagctgctggcgagctgcaggactacgtgcaccaggacctgcggaagttcctgcccgccctggccgaggaagtgcagattcacctggtggaagccctgcccatcgtgctgaacatgttcgagaagaagctgagcagctacgcccagagccacctggaaaacacctccatcaaggtgcacctgagaaccgccgtggccaaggtggaagagaagcagctgctggccaagaccaagcacgaggacggcaagattaccgaggaaaccatcccctacggcaccctgatttgggccaccggcaacaaggccagacccgtgatcaccgacctgttcaagaagatccccgagcagaacagcagcaagcggggcctggccgtgaacgacttcctgcaggtcaaaggcagcaacaacatcttcgccatcggcgacaacgcctttgccggcctgcctcctacagcccaggtggcccaccaggaagccgagtacctggccaagaacttcgacaagatggcccagatccccaatttccagaagaacctgtcctcccggaaggataagatcgacctgctgttcgaggaaaacaacttcaagcccttcaagtacaacgacctgggcgccctggcctacctgggcagcgaaagagccattgccaccatcagaagcggcaagcggaccttctacaccggcggaggcctgatgaccttctacctgtggcggatcctgtacctgagcatgatcctgagcgcccgcagcagactgaaggtgttcttcgactggatcaagctggccttcttcaagagggacttcttcgagggcctgtga

SEQ ID NO: 441 - DNA, 1542 bp, Artificial Sequence
  source: /note="Description of Artificial Sequence: Synthetic polynucleotide"
atgctgagcaagaacctgtacagcaaccggcggctgctgaccagcaccaacaccctcgtgcgcttcgccagcaccagatccaccggcgtcgaaaacagcggggctggccccaccagcttcaagaccatgaaggtcatcgacccccagcacagcgacaagcccaacgtgctgatcctgggctctggctggggcgccatcagctttctgaagcacatcgacaccaagaagtacaacgtcagcatcatcagccccagaagctacttcctgttcacccccctgctgcccagcgcccctgtgggaaccgtggacgagaagtccatcatcgagcccatcgtgaacttcgccctgaagaaaaagggcaacgtcacctactacgaggccgaggccaccagcatcaaccccgaccggaacaccgtgaccatcaagaacctgagcgccgtgtcccagctgtaccagcccgagaaccacctgggcctgcaccaggccgagcccgccgagattaagtacgactacctgatcagcgccgtgggcgccgagcccaacacctttggaatccccggcgtgaccgactacggccacttcctggaggagatccccaacagcctggaaatccggcggaccttcgccgccaacctggaaaaggccaacctgctgcctaagggcgaccccgagcggagaaggctgctgagcatcgtggtcgtgggcggaggccccacaggcgtggaagctgctggcgagctgcaggactacgtgcaccaggacctgcggaagttcttccccgccctggccgaggaagtgcagattcacctggtggaagccctgcccatcgtgctgaacatgttcgagaagaagctgagcagctacgcccagagccacctggaaaacacctccatcaaggtgcacctgagaaccgccgtggccaaggtggaagagaagcagctgctggccaagaccaagcacgaggacggcaagattaccgaggaaaccatcccctacggcaccctgatttgggccaccggcaacaaggccagacccgtgatcaccgacctgttcaagaagatccccgagcagaacagcagcaagcggggcctggccgtgaacgacttcctgcaggtcaaaggcagcaacaacatcttcgccatcggcgacaacgcctttgccggcctgcctcctacagcccaggtggcccaccaggaagccgagtacctggccaagaacttcgacaagatggcccagatccccaatttccagaagaacctgtcctcccggaaggataagatcgacctgctgttcgaggaaaacaacttcaagcccttcaagtacaacgacctgggcgccctggcctacctgggcagcgaaagagccattgccaccatcagaagcggcaagcggaccttctacaccggcggaggcctgatgaccttctacctgtggcggatcctgtacctgagcatgatcctgagcgcccgcagcagactgaaggtgttcttcgactggatcaagatggccttcttcaagagggacttcttcaagggcctgtga

SEQ ID NO: 442 - DNA, 1542 bp, Artificial Sequence
  source: /note="Description of Artificial Sequence: Synthetic polynucleotide"
atgctatcgaagaatttgtatagtaacaagaggttgctcacctcgacgaatacgatggtcagattcgcttccaccagatccacaggggtggaaaactccggagcaggtcctacatcttttaagaccatgaaagtcattgaccctcagcacagcgacaaaccaaacgtgctgatactgggttcggggtggggagctatttcgtttttaaagcacattgacaccaagaagtacaacgtttccatcatctctcctagaaagtatttcttacacacgcctttgttaccttctgcaccagttgggacagtagacgaaaagtcaattattgagcccatcgttaattttgctctcaagaaaaaggggaacgttacctactatgaggcagaagccacctctatcaatcccgacaggaataccgttaccataaaatcattatctgccgttagccagctataccaacctgaaaaccatctagggatgcatcaagcagaacctgctgaaattaagtacgattatttaatcagtgctgtaggtgcggaacctaacacatttggtattcctggggtcactgattacggtcatttcctgaaggaaattcccaactctttggaaataagaagaacttttgccgccaatctagagaaggctaacttattgccaaagggtgatcccgaaagaagaagactactgtccattgtcgtggttggtggtgggcctactggtgtagaggccgctggtgaactacaggattatgttcaccaggacctgagaaagtttttccctgcattggccgaagaagtccaaattcacttggtcgaagctctgcccatcgttttgaatatgtttgagaaaaagctttcatcatacgcgcaatcacatttagaaaacacttcgatcaaagtacatctgagaacggctgtcgccaaagttgaagaaaagcaattgttggcaaagaccaaacacgaagacggtaaaataaccgaagaaactattccatacggtactttgatttgggccacgggtaacaaggcaagaccggtaatcactgaccttttcaagaaaattcctgagcaaaactcgtccaagagaggattggcagtgaatgactttttgcaggtggagggcagcaacaacattttcgccattggtgacaatgcatttagcgggttgccaccaaccgcccaagtagcgcaccaagaggccgaatatatcgccaagaattttgataaaatggctcaaataccaaatttccaaaagaatctatcttcaagaaaggataaaattgatctcttgttcgaggagaacaactttaaacctttcaaatacaacgatttaggtgccttagcatacctgggatccgaaagggccattgcaaccatacgttccggtaagagaacattttacaccggtggtggcttaatgaccttctacttatggcagattttgtacttgtccatgattctatctgcaagatcgagattaaaggtctttttcgactggattaaattagcatttttcaaaagagacttttttgagggattatag

SEQ ID NO: 443 - DNA, 1542 bp, Artificial Sequence
  source: /note="Description of Artificial Sequence: Synthetic polynucleotide"
atgctatcgaagaatttgtatagtaacaagaggttgctcacctcgacgaatacgatggtcagattcgcttccaccagatccacaggggtggaaaactccggagcaggtcctacatcttttaagaccatgaaagtcattgaccctcagcacagcgacaaaccaaacgtgctgatactgggttcggggtggggagctatttcgtttttaaagcacattgacaccaagaagtacaacgtttccatcatctctcctagaaagtatttcttatttacgcctttgatgccttctgcaccagttgggacagtagacgaaaagtcaattattgagcccatcgttaattttgctctcaagaaaaaggggaacgttacctactatgaggcagaagccacctctatcaatcccgacaggaataccgttaccataaaatcattatctgccgttagccagctataccaacctgaaaaccatctagggatgcatcaagcagaacctgctgaaattaagtacgattatttaatcagtgctgtaggtgcggaacctaacacatttggtattcctggggtcactgattacggtcatttcttcgaggaaattcccaactctttggaaataagaagaacttttgccgccaatctagagaaggctaacttattgccaaagggtgatcccgaaagaagaagactactgtccattgtcgtggttggtggtgggcctactggtgtagaggccgctggtgaactacaggattatgttcaccaggacctgagaaagtttctccctgcattggccgaagaagtccaaattcacttggtcgaagctctgcccatcgttttgaatatgtttgagaaagagctttcatcatacgcgcaatcacatttagaaaacacttcgatcaaagtacatctgagaacggctgtcgccaaagttgaagaaaagcaattgttggcaaagaccaaacacgaagacggtaaaataaccgaagaaactattccatacggtactttgatttgggccacgggtaacaaggcaagaccggtaatcactgaccttttcaagaaaattcctgagcaaaactcgtccaagagaggattggcagtgaatgactttttgcaggtggagggcagcaacaacattttcgccattggtgacaatgcatttgctgggttgccaccaaccgcccaagtagcgcaccaagaggccgaatatatcgccaagaattttgataaaatggctcaaataccaaatttccaaaagaatctatcttcaagaaaggataaaattgatctcttgttcgaggagaacaactttaaacctttcaaatacaacgatttaggtgccttagcatacctgggatccgaaagggccattgcaaccatacgttccggtaagagaacattttacaccggtggtggcttaatgaccttctacttatggcagattttgtacttgtccatgattctatctgcaagatcgagattaaaggtctttttcgactggattaaattagcatttttcaaaagagacttttttaaaggattatag

SEQ ID NO: 444 - DNA, 1542 bp, Artificial Sequence
  source: /note="Description of Artificial Sequence: Synthetic polynucleotide"
atgctatcgaagaatttgtatagtaaccggaggttgctcacctcgacgaatacgctagtcagattcgcttccaccagatccacaggggtggaaaactccggagcaggtcctacatcttttaagaccatgaaagtcattgaccctcagcacagcgacaaaccaaacgtgctgatactgggttcggggtggggagctatttcgtttttaaagcacattgacaccaagaagtacaacgtttccatcatctctcctagaagctatttcttatttacgcctttgttaccttctgcaccagttgggacagtagacgaaaagtcaattattgagcccatcgttaattttgctctcaagaaaaaggggaacgttacctactatgaggcagaagccacctctatcaatcccgacaggaataccgttaccataaaaaacttatctgccgttagccagctataccaacctgaaaaccatctagggctgcatcaagcagaacctgctgaaattaagtacgattatttaatcagtgctgtaggtgcggaacctaacacatttggtattcctggggtcactgattacggtcatttcttcgaggaaattcccaactctttggaaataagaagaacttttgccgccaatctagaggaggctaacttattgccaaagggtgatcccgaaagaagaagactactgtccattgtcgtggttggtggtgggcctactggtgtagaggccgctggtgaactacaggattatgttcaccaggacctgagaaagtttctccctgcattggccgaagaagtccaaattcacttggtcgaagctctgcccatcgttttgaatatgtttgagaaagagctttcatcatacgcgcaatcacatttagaaaacacttcgatcaaagtacatctgagaacggctgtcgccaaagttgaagaaaagcaattgttggcaaagaccaaacacgaagacggtaaaataaccgaagaaactattccatacggtactttgatttgggccacgggtaacaaggcaagaccggtaatcactgaccttttcaagaaaattcctgagcaaaactcgtccaagagaggattggcagtgaatgactttttgcaggtggagggcagcaacaacattttcgccattggtgacaatgcatttgctgggttgccaccaaccgcccaagtagcgcaccaagaggccgaatatatcgccaagaattttgataaaatggctcaaataccaaatttccaaaagaatctatcttcaagaaaggataaaattgatctcttgttcgaggagaacaactttaaacctttcaaatacaacgatttaggtgccttagcatacctgggatccgaaagggccattgcaaccatacgttccggtaagagaacattttacaccggtggtggcttaatgaccttctacttatggcagattttgtacttgtccatgattctatctgcaagatcgagattaaaggtctttttcgactggattaaaatggcatttttcaaaagagacttttttaaaggattatag

SEQ ID NO: 445 - DNA, 1542 bp, Artificial Sequence
  source: /note="Description of Artificial Sequence: Synthetic polynucleotide"
atgctatcgaagaatttgtatagtaacaagaggttgctcacctcgacgaatacgctagtcagattcgcttccaccagatccacaggggtggaaaactccggagcaggtcctacatcttttaagaccatgaaagtcattgaccctcagcacagcgacaaaccaaacgtgctgatactgggttcggggtggggagctatttcgtttttaaagcacattgacaccaagaagtacaacgtttccatcatctctcctagaagctatttcttatttacgcctttgttaccttctgcaccagttgggacagtagacgaaaagtcaattattgagcccatcgttaattttgctctcaagaaaaaggggaacgttacctactatgaggcagaagccacctctatcaatcccgacaggaataccgttaccataaaaaacttatctgccgttagccagctataccaacctgaaaaccatctagggctgcatcaagcagaacctgctgaaattaagtacgattatttaatcagtgctgtaggtgcggaacctaacacatttggtattcctggggtcactgattacggtcatttcttcaaggaaattcccaactctttggaaataagaagaacttttgccgccaatctagaggaggctaacttattgccaaagggtgatcccgaaagaagaagactactgtccattgtcgtggttggtggtgggcctactggtgtagaggccgctggtgaactacaggattatgttcaccaggacctgagaaagtttttccctgcattggccgaagaagtccaaattcacttggtcgaagctctgcccatcgttttgaatatgtttgagaaagagctttcatcatacgcgcaatcacatttagaaaacacttcgatcaaagtacatctgagaacggctgtcgccaaagttgaagaaaagcaattgttggcaaagaccaaacacgaagacggtaaaataaccgaagaaactattccatacggtactttgatttgggccacgggtaacaaggcaagaccggtaatcactgaccttttcaagaaaattcctgagcaaaactcgtccaagagaggattggcagtgaatgactttttgcaggtgaaaggcagcaacaacattttcgccattggtgacaatgcatttagcgggttgccaccaaccgcccaagtagcgcaccaagaggccgaatatatcgccaagaattttgataaaatggctcaaataccaaatttccaaaagaatctatcttcaagaaaggataaaattgatctcttgttcgaggagaacaactttaaacctttcaaatacaacgatttaggtgccttagcatacctgggatccgaaagggccattgcaaccatacgttccggtaagagaacattttacaccggtggtggcttaatgaccttctacttatggcagattttgtacatgtccatgattctatctgcaagatcgagattaaaggtctttttcgactggattaaattagcatttttcaaaagagacttttttgagggattatag

SEQ ID NO: 446 - DNA, 1542 bp, Artificial Sequence
  source: /note="Description of Artificial Sequence: Synthetic polynucleotide"
atgctatcgaagaatttgtatagtaaccggaggttgctcacctcgacgaatacgatggtcagattcgcttccaccagatccacaggggtggaaaactccggagcaggtcctacatcttttaagaccatgaaagtcattgaccctcagcacagcgacaaaccaaacgtgctgatactgggttcggggtggggagctatttcgtttttaaagcacattgacaccaagaagtacaacgtttccatcatctctcctagaaagtatttcttacacacgcctttgttaccttctgcaccagttgggacagtagacgaaaagtcaattattgagcccatcgttaattttgctctcaagaaaaaggggaacgttacctactatgaggcagaagccacctctatcaatcccgacaggaataccgttaccataaaaaacttatctgccgttagccagctataccaacctgaaaaccatctagggctgcatcaagcagaacctgctgaaattaagtacgattatttaatcagtgctgtaggtgcggaacctaacacatttggtattcctggggtcactgattacggtcatttcttcaaggaaattcccaactctttggaaataagaagaacttttgccgccaatctagaggaggctaacttattgccaaagggtgatcccgaaagaagaagactactgtccattgtcgtggttggtggtgggcctactggtgtagaggccgctggtgaactacaggattatgttcaccaggacctgagaaagtttctccctgcattggccgaagaagtccaaattcacttggtcgaagctctgcccatcgttttgaatatgtttgagaaagagctttcatcatacgcgcaatcacatttagaaaacacttcgatcaaagtacatctgagaacggctgtcgccaaagttgaagaaaagcaattgttggcaaagaccaaacacgaagacggtaaaataaccgaagaaactattccatacggtactttgatttgggccacgggtaacaaggcaagaccggtaatcactgaccttttcaagaaaattcctgagcaaaactcgtccaagagaggattggcagtgaatgactttttgcaggtgaaaggcagcaacaacattttcgccattggtgacaatgcatttgctgggttgccaccaaccgcccaagtagcgcaccaagaggccgaatatttggccaagaattttgataaaatggctcaaataccaaatttccaaaagaatctatcttcaagaaaggataaaattgatctcttgttcgaggagaacaactttaaacctttcaaatacaacgatttaggtgccttagcatacctgggatccgaaagggccattgcaaccatacgttccggtaagagaacattttacaccggtggtggcttaatgaccttctacttatggagaattttgtacatgtccatgattctatctgcaagatcgagattaaaggtctttttcgactggattaaattagcatttttcaaaagagacttttttgagggattatag

SEQ ID NO: 447 - DNA, 1542 bp, Artificial Sequence
  source: /note="Description of Artificial Sequence: Synthetic polynucleotide"
atgctatcgaagaatttgtatagtaacaagaggttgctcacctcgacgaatacgctagtcagattcgcttccaccagatccacaggggtggaaaactccggagcaggtcctacatcttttaagaccatgaaagtcattgaccctcagcacagcgacaaaccaaacgtgctgatactgggttcggggtggggagctatttcgtttttaaagcacattgacaccaagaagtacaacgtttccatcatctctcctagaaagtatttcttacacacgcctttgatgccttctgcaccagttgggacagtagacgaaaagtcaattattgagcccatcgttaattttgctctcaagaaaaaggggaacgttacctactatgaggcagaagccacctctatcaatcccgacaggaataccgttaccataaaaaacttatctgccgttagccagctataccaacctgaaaaccatctagggatgcatcaagcagaacctgctgaaattaagtacgattatttaatcagtgctgtaggtgcggaacctaacacatttggtattcctggggtcactgattacggtcatttcctggaggaaattcccaactctttggaaataagaagaacttttgccgccaatctagagaaggctaacttattgccaaagggtgatcccgaaagaagaagactactgtccattgtcgtggttggtggtgggcctactggtgtagaggccgctggtgaactacaggattatgttcaccaggacctgagaaagtttctccctgcattggccgaagaagtccaaattcacttggtcgaagctctgcccatcgttttgaatatgtttgagaaagagctttcatcatacgcgcaatcacatttagaaaacacttcgatcaaagtacatctgagaacggctgtcgccaaagttgaagaaaagcaattgttggcaaagaccaaacacgaagacggtaaaataaccgaagaaactattccatacggtactttgatttgggccacgggtaacaaggcaagaccggtaatcactgaccttttcaagaaaattcctgagcaaaactcgtccaagagaggattggcagtgaatgactttttgcaggtgaaaggcagcaacaacattttcgccattggtgacaatgcatttgctgggttgccaccaaccgcccaagtagcgcaccaagaggccgaatatttggccaagaattttgataaaatggctcaaataccaaatttccaaaagaatctatcttcaagaaaggataaaattgatctcttgttcgaggagaacaactttaaacctttcaaatacaacgatttaggtgccttagcatacctgggatccgaaagggccattgcaaccatacgttccggtaagagaacattttacaccggtggtggcttaatgaccttctacttatggagaattttgtacatgtccatgattctatctgcaagatcgagattaaaggtctttttcgactggattaaattagcatttttcaaaagagacttttttgagggattatag

SEQ ID NO: 448 - DNA, 1542 bp, Artificial Sequence
  source: /note="Description of Artificial Sequence: Synthetic polynucleotide"
atgctatcgaagaatttgtatagtaaccggaggttgctcacctcgacgaatacgctagtcagattcgcttccaccagatccacaggggtggaaaactccggagcaggtcctacatcttttaagaccatgaaagtcattgaccctcagcacagcgacaaaccaaacgtgctgatactgggttcggggtggggagctatttcgtttttaaagcacattgacaccaagaagtacaacgtttccatcatctctcctagaaagtatttcttacacacgcctttgatgccttctgcaccagttgggacagtagacgaaaagtcaattattgagcccatcgttaattttgctctcaagaaaaaggggaacgttacctactatgaggcagaagccacctctatcaatcccgacaggaataccgttaccataaaaaacttatctgccgttagccagctataccaacctgaaaaccatctagggatgcatcaagcagaacctgctgaaattaagtacgattatttaatcagtgctgtaggtgcggaacctaacacatttggtattcctggggtcactgattacggtcatttcctgaaggaaattcccaactctttggaaataagaagaacttttgccgccaatctagagaaggctaacttattgccaaagggtgatcccgaaagaagaagactactgtccattgtcgtggttggtggtgggcctactggtgtagaggccgctggtgaactacaggattatgttcaccaggacctgagaaagtttctccctgcattggccgaagaagtccaaattcacttggtcgaagctctgcccatcgttttgaatatgtttgagaaagagctttcatcatacgcgcaatcacatttagaaaacacttcgatcaaagtacatctgagaacggctgtcgccaaagttgaagaaaagcaattgttggcaaagaccaaacacgaagacggtaaaataaccgaagaaactattccatacggtactttgatttgggccacgggtaacaaggcaagaccggtaatcactgaccttttcaagaaaattcctgagcaaaactcgtccaagagaggattggcagtgaatgactttttgcaggtgaaaggcagcaacaacattttcgccattggtgacaatgcatttgctgggttgccaccaaccgcccaagtagcgcaccaagaggccgaatatttggccaagaattttgataaaatggctcaaataccaaatttccaaaagaatctatcttcaagaaaggataaaattgatctcttgttcgaggagaacaactttaaacctttcaaatacaacgatttaggtgccttagcatacctgggatccgaaagggccattgcaaccatacgttccggtaagagaacattttacaccggtggtggcttaatgaccttctacttatggcagattttgtacatgtccatgattctatctgcaagatcgagattaaaggtctttttcgactggattaaaatggcatttttcaaaagagacttttttaaaggattatag

SEQ ID NO: 449 - DNA, 1542 bp, Artificial Sequence
  source: /note="Description of Artificial Sequence: Synthetic polynucleotide"
atgctatcgaagaatttgtatagtaaccggaggttgctcacctcgacgaatacgatggtcagattcgcttccaccagatccacaggggtggaaaactccggagcaggtcctacatcttttaagaccatgaaagtcattgaccctcagcacagcgacaaaccaaacgtgctgatactgggttcggggtggggagctatttcgtttttaaagcacattgacaccaagaagtacaacgtttccatcatctctcctagaagctatttcttatttacgcctttgatgccttctgcaccagttgggacagtagacgaaaagtcaattattgagcccatcgttaattttgctctcaagaaaaaggggaacgttacctactatgaggcagaagccacctctatcaatcccgacaggaataccgttaccataaaatcattatctgccgttagccagctataccaacctgaaaaccatctagggatgcatcaagcagaacctgctgaaattaagtacgattatttaatcagtgctgtaggtgcggaacctaacacatttggtattcctggggtcactgattacggtcatttcctggaggaaattcccaactctttggaaataagaagaacttttgccgccaatctagagaaggctaacttattgccaaagggtgatcccgaaagaagaagactactgtccattgtcgtggttggtggtgggcctactggtgtagaggccgctggtgaactacaggattatgttcaccaggacctgagaaagtttttccctgcattggccgaagaagtccaaattcacttggtcgaagctctgcccatcgttttgaatatgtttgagaaagagctttcatcatacgcgcaatcacatttagaaaacacttcgatcaaagtacatctgagaacggctgtcgccaaagttgaagaaaagcaattgttggcaaagaccaaacacgaagacggtaaaataaccgaagaaactattccatacggtactttgatttgggccacgggtaacaaggcaagaccggtaatcactgaccttttcaagaaaattcctgagcaaaactcgtccaagagaggattggcagtgaatgactttttgcaggtgaaaggcagcaacaacattttcgccattggtgacaatgcatttagcgggttgccaccaaccgcccaagtagcgcaccaagaggccgaatatttggccaagaattttgataaaatggctcaaataccaaatttccaaaagaatctatcttcaagaaaggataaaattgatctcttgttcgaggagaacaactttaaacctttcaaatacaacgatttaggtgccttagcatacctgggatccgaaagggccattgcaaccatacgttccggtaagagaacattttacaccggtggtggcttaatgaccttctacttatggcagattttgtacatgtccatgattctatctgcaagatcgagattaaaggtctttttcgactggattaaattagcatttttcaaaagagacttttttaaaggattatag

SEQ ID NO: 450 - DNA, 1542 bp, Artificial Sequence
  source: /note="Description of Artificial Sequence: Synthetic polynucleotide"
atgctatcgaagaatttgtatagtaaccggaggttgctcacctcgacgaatacgctagtcagattcgcttccaccagatccacaggggtggaaaactccggagcaggtcctacatcttttaagaccatgaaagtcattgaccctcagcacagcgacaaaccaaacgtgctgatactgggttcggggtggggagctatttcgtttttaaagcacattgacaccaagaagtacaacgtttccatcatctctcctagaaagtatttcttatttacgcctttgatgccttctgcaccagttgggacagtagacgaaaagtcaattattgagcccatcgttaattttgctctcaagaaaaaggggaacgttacctactatgaggcagaagccacctctatcaatcccgacaggaataccgttaccataaaaaacttatctgccgttagccagctataccaacctgaaaaccatctagggctgcatcaagcagaacctgctgaaattaagtacgattatttaatcagtgctgtaggtgcggaacctaacacatttggtattcctggggtcactgattacggtcatttcttcaaggaaattcccaactctttggaaataagaagaacttttgccgccaatctagagaaggctaacttattgccaaagggtgatcccgaaagaagaagactactgtccattgtcgtggttggtggtgggcctactggtgtagaggccgctggtgaactacaggattatgttcaccaggacctgagaaagtttctccctgcattggccgaagaagtccaaattcacttggtcgaagctctgcccatcgttttgaatatgtttgagaaagagctttcatcatacgcgcaatcacatttagaaaacacttcgatcaaagtacatctgagaacggctgtcgccaaagttgaagaaaagcaattgttggcaaagaccaaacacgaagacggtaaaataaccgaagaaactattccatacggtactttgatttgggccacgggtaacaaggcaagaccggtaatcactgaccttttcaagaaaattcctgagcaaaactcgtccaagagaggattggcagtgaatgactttttgcaggtgaaaggcagcaacaacattttcgccattggtgacaatgcatttagcgggttgccaccaaccgcccaagtagcgcaccaagaggccgaatatttggccaagaattttgataaaatggctcaaataccaaatttccaaaagaatctatcttcaagaaaggataaaattgatctcttgttcgaggagaacaactttaaacctttcaaatacaacgatttaggtgccttagcatacctgggatccgaaagggccattgcaaccatacgttccggtaagagaacattttacaccggtggtggcttaatgaccttctacttatggagaattttgtacatgtccatgattctatctgcaagatcgagattaaaggtctttttcgactggattaaattagcatttttcaaaagagacttttttgagggattatag

SEQ ID NO: 451 - DNA, 1542 bp, Artificial Sequence
  source: /note="Description of Artificial Sequence: Synthetic polynucleotide"
atgctatcgaagaatttgtatagtaaccggaggttgctcacctcgacgaatacgatggtcagattcgcttccaccagatccacaggggtggaaaactccggagcaggtcctacatcttttaagaccatgaaagtcattgaccctcagcacagcgacaaaccaaacgtgctgatactgggttcggggtggggagctatttcgtttttaaagcacattgacaccaagaagtacaacgtttccatcatctctcctagaaagtatttcttatttacgcctttgttaccttctgcaccagttgggacagtagacgaaaagtcaattattgagcccatcgttaattttgctctcaagaaaaaggggaacgttacctactatgaggcagaagccacctctatcaatcccgacaggaataccgttaccataaaatcattatctgccgttagccagctataccaacctgaaaaccatctagggctgcatcaagcagaacctgctgaaattaagtacgattatttaatcagtgctgtaggtgcggaacctaacacatttggtattcctggggtcactgattacggtcatttcttcgaggaaattcccaactctttggaaataagaagaacttttgccgccaatctagagaaggctaacttattgccaaagggtgatcccgaaagaagaagactactgtccattgtcgtggttggtggtgggcctactggtgtagaggccgctggtgaactacaggattatgttcaccaggacctgagaaagtttttccctgcattggccgaagaagtccaaattcacttggtcgaagctctgcccatcgttttgaatatgtttgagaaagagctttcatcatacgcgcaatcacatttagaaaacacttcgatcaaagtacatctgagaacggctgtcgccaaagttgaagaaaagcaattgttggcaaagaccaaacacgaagacggtaaaataaccgaagaaactattccatacggtactttgatttgggccacgggtaacaaggcaagaccggtaatcactgaccttttcaagaaaattcctgagcaaaactcgtccaagagaggattggcagtgaatgactttttgcaggtggagggcagcaacaacattttcgccattggtgacaatgcatttgctgggttgccaccaaccgcccaagtagcgcaccaagaggccgaatatttggccaagaattttgataaaatggctcaaataccaaatttccaaaagaatctatcttcaagaaaggataaaattgatctcttgttcgaggagaacaactttaaacctttcaaatacaacgatttaggtgccttagcatacctgggatccgaaagggccattgcaaccatacgttccggtaagagaacattttacaccggtggtggcttaatgaccttctacttatggagaattttgtacttgtccatgattctatctgcaagatcgagattaaaggtctttttcgactggattaaaatggcatttttcaaaagagacttttttgagggattatag

SEQ ID NO: 452 - DNA, 1542 bp, Artificial Sequence
  source: /note="Description of Artificial Sequence: Synthetic polynucleotide"
atgctatcgaagaatttgtatagtaacaagaggttgctcacctcgacgaatacgctagtcagattcgcttccaccagatccacaggggtggaaaactccggagcaggtcctacatcttttaagaccatgaaagtcattgaccctcagcacagcgacaaaccaaacgtgctgatactgggttcggggtggggagctatttcgtttttaaagcacattgacaccaagaagtacaacgtttccatcatctctcctagaaagtatttcttatttacgcctttgttaccttctgcaccagttgggacagtagacgaaaagtcaattattgagcccatcgttaattttgctctcaagaaaaaggggaacgttacctactatgaggcagaagccacctctatcaatcccgacaggaataccgttaccataaaatcattatctgccgttagccagctataccaacctgaaaaccatctagggatgcatcaagcagaacctgctgaaattaagtacgattatttaatcagtgctgtaggtgcggaacctaacacatttggtattcctggggtcactgattacggtcatttcttcgaggaaattcccaactctttggaaataagaagaacttttgccgccaatctagagaaggctaacttattgccaaagggtgatcccgaaagaagaagactactgtccattgtcgtggttggtggtgggcctactggtgtagaggccgctggtgaactacaggattatgttcaccaggacctgagaaagtttttccctgcattggccgaagaagtccaaattcacttggtcgaagctctgcccatcgttttgaatatgtttgagaaagagctttcatcatacgcgcaatcacatttagaaaacacttcgatcaaagtacatctgagaacggctgtcgccaaagttgaagaaaagcaattgttggcaaagaccaaacacgaagacggtaaaataaccgaagaaactattccatacggtactttgatttgggccacgggtaacaaggcaagaccggtaatcactgaccttttcaagaaaattcctgagcaaaactcgtccaagagaggattggcagtgaatgactttttgcaggtggagggcagcaacaacattttcgccattggtgacaatgcatttgctgggttgccaccaaccgcccaagtagcgcaccaagaggccgaatatatcgccaagaattttgataaaatggctcaaataccaaatttccaaaagaatctatcttcaagaaaggataaaattgatctcttgttcgaggagaacaactttaaacctttcaaatacaacgatttaggtgccttagcatacctgggatccgaaagggccattgcaaccatacgttccggtaagagaacattttacaccggtggtggcttaatgaccttctacttatggcagattttgtacatgtccatgattctatctgcaagatcgagattaaaggtctttttcgactggattaaattagcatttttcaaaagagacttttttaaaggattatag

SEQ ID NO: 453 - DNA, 1542 bp, Artificial Sequence
  source: /note="Description of Artificial Sequence: Synthetic polynucleotide"
atgctatcgaagaatttgtatagtaaccggaggttgctcacctcgacgaatacgatggtcagattcgcttccaccagatccacaggggtggaaaactccggagcaggtcctacatcttttaagaccatgaaagtcattgaccctcagcacagcgacaaaccaaacgtgctgatactgggttcggggtggggagctatttcgtttttaaagcacattgacaccaagaagtacaacgtttccatcatctctcctagaagctatttcttatttacgcctttgatgccttctgcaccagttgggacagtagacgaaaagtcaattattgagcccatcgttaattttgctctcaagaaaaaggggaacgttacctactatgaggcagaagccacctctatcaatcccgacaggaataccgttaccataaaatcattatctgccgttagccagctataccaacctgaaaaccatctagggatgcatcaagcagaacctgctgaaattaagtacgattatttaatcagtgctgtaggtgcggaacctaacacatttggtattcctggggtcactgattacggtcatttcctgaaggaaattcccaactctttggaaataagaagaacttttgccgccaatctagaggaggctaacttattgccaaagggtgatcccgaaagaagaagactactgtccattgtcgtggttggtggtgggcctactggtgtagaggccgctggtgaactacaggattatgttcaccaggacctgagaaagtttctccctgcattggccgaagaagtccaaattcacttggtcgaagctctgcccatcgttttgaatatgtttgagaaaaagctttcatcatacgcgcaatcacatttagaaaacacttcgatcaaagtacatctgagaacggctgtcgccaaagttgaagaaaagcaattgttggcaaagaccaaacacgaagacggtaaaataaccgaagaaactattccatacggtactttgatttgggccacgggtaacaaggcaagaccggtaatcactgaccttttcaagaaaattcctgagcaaaactcgtccaagagaggattggcagtgaatgactttttgcaggtgaaaggcagcaacaacattttcgccattggtgacaatgcatttagcgggttgccaccaaccgcccaagtagcgcaccaagaggccgaatatatcgccaagaattttgataaaatggctcaaataccaaatttccaaaagaatctatcttcaagaaaggataaaattgatctcttgttcgaggagaacaactttaaacctttcaaatacaacgatttaggtgccttagcatacctgggatccgaaagggccattgcaaccatacgttccggtaagagaacattttacaccggtggtggcttaatgaccttctacttatggcagattttgtacatgtccatgattctatctgcaagatcgagattaaaggtctttttcgactggattaaaatggcatttttcaaaagagacttttttaaaggattatag

SEQ ID NO: 454 - DNA, 1542 bp, Artificial Sequence
  source: /note="Description of Artificial Sequence: Synthetic polynucleotide"
atgctatcgaagaatttgtatagtaacaagaggttgctcacctcgacgaatacgctagtcagattcgcttccaccagatccacaggggtggaaaactccggagcaggtcctacatcttttaagaccatgaaagtcattgaccctcagcacagcgacaaaccaaacgtgctgatactgggttcggggtggggagctatttcgtttttaaagcacattgacaccaagaagtacaacgtttccatcatctctcctagaaagtatttcttacacacgcctttgatgccttctgcaccagttgggacagtagacgaaaagtcaattattgagcccatcgttaattttgctctcaagaaaaaggggaacgttacctactatgaggcagaagccacctctatcaatcccgacaggaataccgttaccataaaaaacttatctgccgttagccagctataccaacctgaaaaccatctagggatgcatcaagcagaacctgctgaaattaagtacgattatttaatcagtgctgtaggtgcggaacctaacacatttggtattcctggggtcactgattacggtcatttcctggaggaaattcccaactctttggaaataagaagaacttttgccgccaatctagaggaggctaacttattgccaaagggtgatcccgaaagaagaagactactgtccattgtcgtggttggtggtgggcctactggtgtagaggccgctggtgaactacaggattatgttcaccaggacctgagaaagtttctccctgcattggccgaagaagtccaaattcacttggtcgaagctctgcccatcgttttgaatatgtttgagaaaaagctttcatcatacgcgcaatcacatttagaaaacacttcgatcaaagtacatctgagaacggctgtcgccaaagttgaagaaaagcaattgttggcaaagaccaaacacgaagacggtaaaataaccgaagaaactattccatacggtactttgatttgggccacgggtaacaaggcaagaccggtaatcactgaccttttcaagaaaattcctgagcaaaactcgtccaagagaggattggcagtgaatgactttttgcaggtgaaaggcagcaacaacattttcgccattggtgacaatgcatttgctgggttgccaccaaccgcccaagtagcgcaccaagaggccgaatatttggccaagaattttgataaaatggctcaaataccaaatttccaaaagaatctatcttcaagaaaggataaaattgatctcttgttcgaggagaacaactttaaacctttcaaatacaacgatttaggtgccttagcatacctgggatccgaaagggccattgcaaccatacgttccggtaagagaacattttacaccggtggtggcttaatgaccttctacttatggcagattttgtacttgtccatgattctatctgcaagatcgagattaaaggtctttttcgactggattaaaatggcatttttcaaaagagacttttttgagggattatag

SEQ ID NO: 455 - DNA, 1542 bp, Artificial Sequence
  source: /note="Description of Artificial Sequence: Synthetic polynucleotide"
atgctatcgaagaatttgtatagtaacaagaggttgctcacctcgacgaatacgctagtcagattcgcttccaccagatccacaggggtggaaaactccggagcaggtcctacatcttttaagaccatgaaagtcattgaccctcagcacagcgacaaaccaaacgtgctgatactgggttcggggtggggagctatttcgtttttaaagcacattgacaccaagaagtacaacgtttccatcatctctcctagaaagtatttcttatttacgcctttgatgccttctgcaccagttgggacagtagacgaaaagtcaattattgagcccatcgttaattttgctctcaagaaaaaggggaacgttacctactatgaggcagaagccacctctatcaatcccgacaggaataccgttaccataaaatcattatctgccgttagccagctataccaacctgaaaaccatctagggctgcatcaagcagaacctgctgaaattaagtacgattatttaatcagtgctgtaggtgcggaacctaacacatttggtattcctggggtcactgattacggtcatttcttcgaggaaattcccaactctttggaaataagaagaacttttgccgccaatctagagaaggctaacttattgccaaagggtgatcccgaaagaagaagactactgtccattgtcgtggttggtggtgggcctactggtgtagaggccgctggtgaactacaggattatgttcaccaggacctgagaaagtttctccctgcattggccgaagaagtccaaattcacttggtcgaagctctgcccatcgttttgaatatgtttgagaaagagctttcatcatacgcgcaatcacatttagaaaacacttcgatcaaagtacatctgagaacggctgtcgccaaagttgaagaaaagcaattgttggcaaagaccaaacacgaagacggtaaaataaccgaagaaactattccatacggtactttgatttgggccacgggtaacaaggcaagaccggtaatcactgaccttttcaagaaaattcctgagcaaaactcgtccaagagaggattggcagtgaatgactttttgcaggtggagggcagcaacaacattttcgccattggtgacaatgcatttagcgggttgccaccaaccgcccaagtagcgcaccaagaggccgaatatttggccaagaattttgataaaatggctcaaataccaaatttccaaaagaatctatcttcaagaaaggataaaattgatctcttgttcgaggagaacaactttaaacctttcaaatacaacgatttaggtgccttagcatacctgggatccgaaagggccattgcaaccatacgttccggtaagagaacattttacaccggtggtggcttaatgaccttctacttatggagaattttgtacatgtccatgattctatctgcaagatcgagattaaaggtctttttcgactggattaaattagcatttttcaaaagagacttttttgagggattatag

SEQ ID NO: 456 - DNA, 1542 bp, Artificial Sequence
  source: /note="Description of Artificial Sequence: Synthetic polynucleotide"
atgctatcgaagaatttgtatagtaaccggaggttgctcacctcgacgaatacgatggtcagattcgcttccaccagatccacaggggtggaaaactccggagcaggtcctacatcttttaagaccatgaaagtcattgaccctcagcacagcgacaaaccaaacgtgctgatactgggttcggggtggggagctatttcgtttttaaagcacattgacaccaagaagtacaacgtttccatcatctctcctagaaagtatttcttatttacgcctttgttaccttctgcaccagttgggacagtagacgaaaagtcaattattgagcccatcgttaattttgctctcaagaaaaaggggaacgttacctactatgaggcagaagccacctctatcaatcccgacaggaataccgttaccataaaatcattatctgccgttagccagctataccaacctgaaaaccatctagggctgcatcaagcagaacctgctgaaattaagtacgattatttaatcagtgctgtaggtgcggaacctaacacatttggtattcctggggtcactgattacggtcatttcttcgaggaaattcccaactctttggaaataagaagaacttttgccgccaatctagagaaggctaacttattgccaaagggtgatcccgaaagaagaagactactgtccattgtcgtggttggtggtgggcctactggtgtagaggccgctggtgaactacaggattatgttcaccaggacctgagaaagtttttccctgcattggccgaagaagtccaaattcacttggtcgaagctctgcccatcgttttgaatatgtttgagaaaaagctttcatcatacgcgcaatcacatttagaaaacacttcgatcaaagtacatctgagaacggctgtcgccaaagttgaagaaaagcaattgttggcaaagaccaaacacgaagacggtaaaataaccgaagaaactattccatacggtactttgatttgggccacgggtaacaaggcaagaccggtaatcactgaccttttcaagaaaattcctgagcaaaactcgtccaagagaggattggcagtgaatgactttttgcaggtgaaaggcagcaacaacattttcgccattggtgacaatgcatttgctgggttgccaccaaccgcccaagtagcgcaccaagaggccgaatatatcgccaagaattttgataaaatggctcaaataccaaatttccaaaagaatctatcttcaagaaaggataaaattgatctcttgttcgaggagaacaactttaaacctttcaaatacaacgatttaggtgccttagcatacctgggatccgaaagggccattgcaaccatacgttccggtaagagaacattttacaccggtggtggcttaatgaccttctacttatggcagattttgtacatgtccatgattctatctgcaagatcgagattaaaggtctttttcgactggattaaattagcatttttcaaaagagacttttttgagggattatag

SEQ ID NO: 457 - DNA, 1542 bp, Artificial Sequence
  source: /note="Description of Artificial Sequence: Synthetic polynucleotide"
atgctatcgaagaatttgtatagtaaccggaggttgctcacctcgacgaatacgatggtcagattcgcttccaccagatccacaggggtggaaaactccggagcaggtcctacatcttttaagaccatgaaagtcattgaccctcagcacagcgacaaaccaaacgtgctgatactgggttcggggtggggagctatttcgtttttaaagcacattgacaccaagaagtacaacgtttccatcatctctcctagaaagtatttcttatttacgcctttgatgccttctgcaccagttgggacagtagacgaaaagtcaattattgagcccatcgttaattttgctctcaagaaaaaggggaacgttacctactatgaggcagaagccacctctatcaatcccgacaggaataccgttaccataaaaaacttatctgccgttagccagctataccaacctgaaaaccatctagggatgcatcaagcagaacctgctgaaattaagtacgattatttaatcagtgctgtaggtgcggaacctaacacatttggtattcctggggtcactgattacggtcatttcctggaggaaattcccaactctttggaaataagaagaacttttgccgccaatctagagaaggctaacttattgccaaagggtgatcccgaaagaagaagactactgtccattgtcgtggttggtggtgggcctactggtgtagaggccgctggtgaactacaggattatgttcaccaggacctgagaaagtttctccctgcattggccgaagaagtccaaattcacttggtcgaagctctgcccatcgttttgaatatgtttgagaaagagctttcatcatacgcgcaatcacatttagaaaacacttcgatcaaagtacatctgagaacggctgtcgccaaagttgaagaaaagcaattgttggcaaagaccaaacacgaagacggtaaaataaccgaagaaactattccatacggtactttgatttgggccacgggtaacaaggcaagaccggtaatcactgaccttttcaagaaaattcctgagcaaaactcgtccaagagaggattggcagtgaatgactttttgcaggtgaaaggcagcaacaacattttcgccattggtgacaatgcatttgctgggttgccaccaaccgcccaagtagcgcaccaagaggccgaatatatcgccaagaattttgataaaatggctcaaataccaaatttccaaaagaatctatcttcaagaaaggataaaattgatctcttgttcgaggagaacaactttaaacctttcaaatacaacgatttaggtgccttagcatacctgggatccgaaagggccattgcaaccatacgttccggtaagagaacattttacaccggtggtggcttaatgaccttctacttatggcagattttgtacttgtccatgattctatctgcaagatcgagattaaaggtctttttcgactggattaaattagcatttttcaaaagagacttttttaaaggattatag

SEQ ID NO: 458 - DNA, 1542 bp, Artificial Sequence
  source: /note="Description of Artificial Sequence: Synthetic polynucleotide"
atgctatcgaagaatttgtatagtaaccggaggttgctcacctcgacgaatacgctagtcagattcgcttccaccagatccacaggggtggaaaactccggagcaggtcctacatcttttaagaccatgaaagtcattgaccctcagcacagcgacaaaccaaacgtgctgatactgggttcggggtggggagctatttcgtttttaaagcacattgacaccaagaagtacaacgtttccatcatctctcctagaaagtatttcttacacacgcctttgatgccttctgcaccagttgggacagtagacgaaaagtcaattattgagcccatcgttaattttgctctcaagaaaaaggggaacgttacctactatgaggcagaagccacctctatcaatcccgacaggaataccgttaccataaaatcattatctgccgttagccagctataccaacctgaaaaccatctagggctgcatcaagcagaacctgctgaaattaagtacgattatttaatcagtgctgtaggtgcggaacctaacacatttggtattcctggggtcactgattacggtcatttcttcgaggaaattcccaactctttggaaataagaagaacttttgccgccaatctagaggaggctaacttattgccaaagggtgatcccgaaagaagaagactactgtccattgtcgtggttggtggtgggcctactggtgtagaggccgctggtgaactacaggattatgttcaccaggacctgagaaagtttctccctgcattggccgaagaagtccaaattcacttggtcgaagctctgcccatcgttttgaatatgtttgagaaagagctttcatcatacgcgcaatcacatttagaaaacacttcgatcaaagtacatctgagaacggctgtcgccaaagttgaagaaaagcaattgttggcaaagaccaaacacgaagacggtaaaataaccgaagaaactattccatacggtactttgatttgggccacgggtaacaaggcaagaccggtaatcactgaccttttcaagaaaattcctgagcaaaactcgtccaagagaggattggcagtgaatgactttttgcaggtgaaaggcagcaacaacattttcgccattggtgacaatgcatttgctgggttgccaccaaccgcccaagtagcgcaccaagaggccgaatatttggccaagaattttgataaaatggctcaaataccaaatttccaaaagaatctatcttcaagaaaggataaaattgatctcttgttcgaggagaacaactttaaacctttcaaatacaacgatttaggtgccttagcatacctgggatccgaaagggccattgcaaccatacgttccggtaagagaacattttacaccggtggtggcttaatgaccttctacttatggcagattttgtacttgtccatgattctatctgcaagatcgagattaaaggtctttttcgactggattaaaatggcatttttcaaaagagacttttttaaaggattatag

SEQ ID NO: 459 - DNA, 1542 bp, Artificial Sequence
  source: /note="Description of Artificial Sequence: Synthetic polynucleotide"
atgctatcgaagaatttgtatagtaaccggaggttgctcacctcgacgaatacgatggtcagattcgcttccaccagatccacaggggtggaaaactccggagcaggtcctacatcttttaagaccatgaaagtcattgaccctcagcacagcgacaaaccaaacgtgctgatactgggttcggggtggggagctatttcgtttttaaagcacattgacaccaagaagtacaacgtttccatcatctctcctagaagctatttcttatttacgcctttgatgccttctgcaccagttgggacagtagacgaaaagtcaattattgagcccatcgttaattttgctctcaagaaaaaggggaacgttacctactatgaggcagaagccacctctatcaatcccgacaggaataccgttaccataaaaaacttatctgccgttagccagctataccaacctgaaaaccatctagggatgcatcaagcagaacctgctgaaattaagtacgattatttaatcagtgctgtaggtgcggaacctaacacatttggtattcctggggtcactgattacggtcatttcctgaaggaaattcccaactctttggaaataagaagaacttttgccgccaatctagagaaggctaacttattgccaaagggtgatcccgaaagaagaagactactgtccattgtcgtggttggtggtgggcctactggtgtagaggccgctggtgaactacaggattatgttcaccaggacctgagaaagtttttccctgcattggccgaagaagtccaaattcacttggtcgaagctctgcccatcgttttgaatatgtttgagaaagagctttcatcatacgcgcaatcacatttagaaaacacttcgatcaaagtacatctgagaacggctgtcgccaaagttgaagaaaagcaattgttggcaaagaccaaacacgaagacggtaaaataaccgaagaaactattccatacggtactttgatttgggccacgggtaacaaggcaagaccggtaatcactgaccttttcaagaaaattcctgagcaaaactcgtccaagagaggattggcagtgaatgactttttgcaggtggagggcagcaacaacattttcgccattggtgacaatgcatttgctgggttgccaccaaccgcccaagtagcgcaccaagaggccgaatatatcgccaagaattttgataaaatggctcaaataccaaatttccaaaagaatctatcttcaagaaaggataaaattgatctcttgttcgaggagaacaactttaaacctttcaaatacaacgatttaggtgccttagcatacctgggatccgaaagggccattgcaaccatacgttccggtaagagaacattttacaccggtggtggcttaatgaccttctacttatggagaattttgtacttgtccatgattctatctgcaagatcgagattaaaggtctttttcgactggattaaattagcatttttcaaaagagacttttttgagggattatag

SEQ ID NO: 460 - DNA, 1542 bp, Artificial Sequence
  source: /note="Description of Artificial Sequence: Synthetic polynucleotide"
atgctatcgaagaatttgtatagtaaccggaggttgctcacctcgacgaatacgctagtcagattcgcttccaccagatccacaggggtggaaaactccggagcaggtcctacatcttttaagaccatgaaagtcattgaccctcagcacagcgacaaaccaaacgtgctgatactgggttcggggtggggagctatttcgtttttaaagcacattgacaccaagaagtacaacgtttccatcatctctcctagaaagtatttcttacacacgcctttgttaccttctgcaccagttgggacagtagacgaaaagtcaattattgagcccatcgttaattttgctctcaagaaaaaggggaacgttacctactatgaggcagaagccacctctatcaatcccgacaggaataccgttaccataaaatcattatctgccgttagccagctataccaacctgaaaaccatctagggctgcatcaagcagaacctgctgaaattaagtacgattatttaatcagtgctgtaggtgcggaacctaacacatttggtattcctggggtcactgattacggtcatttcttcgaggaaattcccaactctttggaaataagaagaacttttgccgccaatctagagaaggctaacttattgccaaagggtgatcccgaaagaagaagactactgtccattgtcgtggttggtggtgggcctactggtgtagaggccgctggtgaactacaggattatgttcaccaggacctgagaaagtttctccctgcattggccgaagaagtccaaattcacttggtcgaagctctgcccatcgttttgaatatgtttgagaaagagctttcatcatacgcgcaatcacatttagaaaacacttcgatcaaagtacatctgagaacggctgtcgccaaagttgaagaaaagcaattgttggcaaagaccaaacacgaagacggtaaaataaccgaagaaactattccatacggtactttgatttgggccacgggtaacaaggcaagaccggtaatcactgaccttttcaagaaaattcctgagcaaaactcgtccaagagaggattggcagtgaatgactttttgcaggtgaaaggcagcaacaacattttcgccattggtgacaatgcatttagcgggttgccaccaaccgcccaagtagcgcaccaagaggccgaatatatcgccaagaattttgataaaatggctcaaataccaaatttccaaaagaatctatcttcaagaaaggataaaattgatctcttgttcgaggagaacaactttaaacctttcaaatacaacgatttaggtgccttagcatacctgggatccgaaagggccattgcaaccatacgttccggtaagagaacattttacaccggtggtggcttaatgaccttctacttatggagaattttgtacatgtccatgattctatctgcaagatcgagattaaaggtctttttcgactggattaaaatggcatttttcaaaagagacttttttaaaggattatag

SEQ ID NO: 461 - DNA, 1542 bp, Artificial Sequence
  source: /note="Description of Artificial Sequence: Synthetic polynucleotide"
atgctatcgaagaatttgtatagtaacaagaggttgctcacctcgacgaatacgatggtcagattcgcttccaccagatccacaggggtggaaaactccggagcaggtcctacatcttttaagaccatgaaagtcattgaccctcagcacagcgacaaaccaaacgtgctgatactgggttcggggtggggagctatttcgtttttaaagcacattgacaccaagaagtacaacgtttccatcatctctcctagaaagtatttcttatttacgcctttgatgccttctgcaccagttgggacagtagacgaaaagtcaattattgagcccatcgttaattttgctctcaagaaaaaggggaacgttacctactatgaggcagaagccacctctatcaatcccgacaggaataccgttaccataaaatcattatctgccgttagccagctataccaacctgaaaaccatctagggatgcatcaagcagaacctgctgaaattaagtacgattatttaatcagtgctgtaggtgcggaacctaacacatttggtattcctggggtcactgattacggtcatttcctgaaggaaattcccaactctttggaaataagaagaacttttgccgccaatctagagaaggctaacttattgccaaagggtgatcccgaaagaagaagactactgtccattgtcgtggttggtggtgggcctactggtgtagaggccgctggtgaactacaggattatgttcaccaggacctgagaaagtttttccctgcattggccgaagaagtccaaattcacttggtcgaagctctgcccatcgttttgaatatgtttgagaaaaagctttcatcatacgcgcaatcacatttagaaaacacttcgatcaaagtacatctgagaacggctgtcgccaaagttgaagaaaagcaattgttggcaaagaccaaacacgaagacggtaaaataaccgaagaaactattccatacggtactttgatttgggccacgggtaacaaggcaagaccggtaatcactgaccttttcaagaaaattcctgagcaaaactcgtccaagagaggattggcagtgaatgactttttgcaggtgaaaggcagcaacaacattttcgccattggtgacaatgcatttagcgggttgccaccaaccgcccaagtagcgcaccaagaggccgaatatatcgccaagaattttgataaaatggctcaaataccaaatttccaaaagaatctatcttcaagaaaggataaaattgatctcttgttcgaggagaacaactttaaacctttcaaatacaacgatttaggtgccttagcatacctgggatccgaaagggccattgcaaccatacgttccggtaagagaacattttacaccggtggtggcttaatgaccttctacttatggagaattttgtacatgtccatgattctatctgcaagatcgagattaaaggtctttttcgactggattaaaatggcatttttcaaaagagacttttttgagggattatag

SEQ ID NO: 462 - DNA, 1542 bp, Artificial Sequence
  source: /note="Description of Artificial Sequence: Synthetic polynucleotide"
atgctgtcgaagaatttgtatagtaaccggaggttgctcacctcgacgaataccatggtgagattcgctagcaccagatccaccggggtcgaaaactccggagcaggtcccacatcttttaagaccatgaaggtcattgacccccagcacagcgacaaacccaacgtgctgatcctgggttcgggctggggagctatttcgtttttaaagcacattgacaccaagaagtacaacgtttccatcatctctcccagaagctatttcttattcacgcctttgatgccttctgcaccagttgggaccgtagacgaaaagtcaattatcgagcccatcgttaactttgctctcaagaaaaaggggaacgtcacctactatgaggcagaagccaccagcatcaaccccgaccggaacaccgttaccataaagtcactgagcgccgtttcccagctataccagcccgaaaaccacctagggctgcatcaagcagaacctgccgagattaagtacgactacttaatcagcgctgtgggtgccgagcccaacacatttggaattcctggcgtcaccgattacggtcatttcctgaaggaaattcccaactctttggaaataagaagaacttttgccgccaacctggaagaggccaacttattgcctaagggtgatcccgaaagaagaaggctactgtccattgtcgtcgttggcggtggccctactggtgtagaagccgctggcgaactgcaggattatgttcaccaggacctgagaaagtttttccctgcattggccgaagaagtccaaattcacttggtcgaagctctgcccatcgttctgaatatgtttgagaaggagctttcaagctacgcccagtcacatttagaaaacacctccatcaaagtgcatctgagaacggctgtggccaaagttgaagaaaagcagttgttggcaaagaccaaacacgaagacggtaaaattaccgaggaaactattccatacggcactctgatttgggccacgggtaacaaggccagacccgtaatcactgaccttttcaagaaaattcctgagcaaaactcgagcaagagaggattggccgtgaacgactttttgcaggtggagggcagcaacaacattttcgccatcggtgacaatgcctttagcgggttgccacctaccgcccaagtggcccaccaagaggccgaatatttggccaagaattttgataagatggctcagataccaaatttccaaaagaatctatcctcacggaaggataaaattgatctcttgttcgaggagaacaactttaaacctttcaagtacaacgacctgggtgccttagcatacctgggatccgaaagggccattgcaaccatccgtagcggtaagcggacattctacaccggtggaggcttaatgaccttctacttatggcagattttgtacctgtccatgattctaagcgccagatcgagattaaaggtctttttcgactggattaagatggcatttttcaagagggactttttcaaaggcctgtag

SEQ ID NO: 463 - DNA, 1542 bp, Artificial Sequence
  source: /note="Description of Artificial Sequence: Synthetic polynucleotide"
atgctatcgaagaatttgtatagtaaccggcggctgctcacctcgacgaataccatggtgagattcgcttccaccagatccacaggggtcgaaaactccggagcaggtcctacatcttttaagaccatgaaggtcatcgacccccagcacagcgacaaacccaacgtgctgatcctgggctcggggtggggcgctatcagctttctgaagcacattgacaccaagaagtacaacgtttccatcatctctcctagaaagtatttcttacacacgcctctgatgccttctgcacctgttgggacagtagacgaaaagtcaatcattgagcccatcgttaattttgctctcaagaaaaagggcaacgtcacctactatgaggcagaagccacctctatcaaccccgaccggaacaccgttaccataaaaagcttaagcgccgtgagccagctataccaacctgaaaaccatctaggcatgcatcaggccgaacccgctgaaattaagtacgactatctgatcagtgctgtaggtgcggaacctaacacatttggtattcctggcgtgactgactacggtcatttcctgaaggaaatccccaacagcttggaaatacggagaacttttgccgccaatctagagaaggctaacctgttgccaaagggtgaccccgaacggagaaggctgctgagcatcgtcgtggttggcggtgggcctactggcgtagaggctgctggcgaactgcaggattatgttcaccaggacctgcggaagtttttccctgcattggccgaagaagtccaaattcacctggtcgaagctctgcccatcgttctgaatatgtttgagaaagagctgtcatcatacgcccagtcacatctggaaaacacctccatcaaggtgcacctgagaacggctgtcgccaaagtggaagagaagcaactgttggcaaagaccaagcacgaagacggtaaaataaccgaagaaactattccatacggtactttgatttgggccacgggtaacaaggcaagaccggtgatcaccgacctgttcaagaagattcctgagcaaaactcgtccaagcggggattggcagtgaatgacttcttgcaggtggagggcagcaacaacattttcgccattggtgacaacgcatttgctgggttgccacctacagcccaggtagcgcaccaagaggccgagtatctggccaagaatttcgataagatggctcaaataccaaatttccaaaagaatctgtcttcacggaaggataaaattgatctgctgttcgaggagaacaacttcaaacctttcaaatacaacgacttaggtgccttagcatacctgggatccgaaagggccattgcaaccataagatccggtaagagaacattctacaccggcggtggcttaatgaccttctacttatggagaatcttgtacatgtccatgatcctatctgcacgcagcagattaaaggtctttttcgactggatcaaattagccttcttcaaaagagactttttcaaaggcctgtga

SEQ ID NO: 464 - DNA, 1542 bp, Artificial Sequence
  source: /note="Description of Artificial Sequence: Synthetic polynucleotide"
atgctgtcgaagaacttgtacagtaacaagaggttgctgacctcgaccaacacgctagtgagattcgcttccaccagatccaccggggtggaaaacagcggggcaggccccacaagcttcaagaccatgaaagtcattgaccctcagcacagcgacaagccaaacgtgctgatcctgggttctgggtggggagctatttcgtttttaaagcacatcgacaccaagaagtacaacgtctccatcatcagccctagaagctatttcttatttacgcctttgatgcccagcgcacctgttgggacagtggacgagaagtcaatcattgagcccatcgtgaattttgccctgaagaaaaaggggaacgttacctactatgaggcagaagccaccagcatcaatcccgaccggaacaccgttaccataaagtcattatctgccgttagccagctgtaccaacctgagaaccatctagggctgcatcaagcagaacccgctgaaattaagtacgattacttaatcagtgctgtaggtgccgaacctaacacatttggtattcctggggtgactgattacggtcatttcttcgaggaaattcccaacagcttggaaatcagaagaacctttgccgccaatctagaggaggccaacctgctgcctaagggtgatcccgaaagaagaagactactgagcattgtcgtcgtgggcggagggcctacaggcgtggaggccgctggcgagctacaggactatgttcaccaggacctgagaaagtttctccccgccttggccgaggaagtgcaaattcacctggtcgaagctctgcccatcgttctgaacatgtttgagaaagagctttcatcatacgcgcaaagccatttagaaaacacttcgatcaaagtacatctgagaaccgctgtcgccaaggtggaagaaaagcaattgttggcaaagaccaaacacgaggacggtaaaataaccgaagaaaccatcccatacggtactttgatttgggccaccggtaacaaggccagaccggtgatcactgaccttttcaagaaaattcctgagcagaactcgtccaagcggggcttggcagtgaacgactttctgcaggtggagggcagcaacaacattttcgccatcggcgacaatgcatttagcgggttgcctccaaccgcccaagtagcgcaccaagaggccgaatacatcgccaagaattttgataaaatggcccagataccaaatttccaaaagaatctatcctcaagaaaggataaaattgatctcttgttcgaggagaacaactttaaacctttcaaatacaacgatctgggtgccttagcatacctgggatccgaaagggccattgcaaccatacgtagcggtaagagaaccttctacaccggtggtggcttaatgaccttctacttatggcggatcttgtacatgtccatgattctatctgccagaagcagattaaaggtctttttcgactggatcaaattagcctttttcaagagagacttctttgagggattatag

SEQ ID NO: 465 - DNA, 1542 bp, Artificial Sequence
  source: /note="Description of Artificial Sequence: Synthetic polynucleotide"
atgctgtcgaagaatttgtacagcaaccggaggctgctcacctcgacgaataccatggtcagattcgcctccaccagatccaccggggtggaaaactccggggcaggtcccacctcttttaagaccatgaaagtcattgaccctcagcacagcgacaagcccaacgtgctgatactgggctcggggtggggcgctatttcgtttttaaagcacatcgacaccaagaagtacaacgtttccatcatcagccctagaaagtatttcctgtttacccccttgttaccttctgccccagtggggaccgtagacgaaaagtccattattgagcccatcgttaatttcgctctcaagaaaaagggcaacgtcacctactatgaggcagaagccacctctatcaaccccgacaggaataccgttaccatcaagtcactgtctgccgtgagccagctataccaacctgagaaccacctaggcctgcatcaagcagagcctgctgaaattaagtacgattatttaatcagcgccgtaggtgcggaacctaacacatttggaattcccggggtcactgattacggccatttcttcaaggagatccccaactctctggaaatccggagaacttttgccgccaacctagaggaggctaacctgttgccaaagggtgaccccgaaagaagaagactgctgtccattgtcgtggttggtggtgggcctacaggtgtagaggctgctggcgaactacaggattatgttcaccaggacctgagaaagtttttccctgcactggccgaagaagtccaaattcacctggtcgaagctctgcccatcgtgctgaacatgttcgagaaagagctgtcatcatacgcccagtcacatttagaaaacacctcgatcaaagtacacctgagaacggctgtggccaaagttgaagagaagcaattgttggcaaagaccaaacacgaggacggtaaaataaccgaagaaaccattccatacggtactttgatttgggccacgggcaacaaggcaagaccggtaatcaccgacctgttcaagaaaatccctgagcaaaactcgagcaagcggggattggcagtgaacgactttttgcaggtgaaaggcagcaacaacattttcgccatcggtgacaacgcatttagcgggctgccaccaaccgcccaagtagcgcaccaagaggccgaatatatcgccaagaattttgataaaatggcccagataccaaatttccagaagaatctatcttcaagaaaggataaaattgatctgttgttcgaggaaaacaactttaagcccttcaagtacaacgacttaggtgccctggcctacctgggcagcgaaagggccattgcaaccatacgttccggtaagagaaccttctacaccggtggtggcctgatgaccttctacttatggcagattttgtacttgtccatgatcctaagcgccagatcgagattaaaggtctttttcgactggattaaattagcctttttcaaaagagacttcttcaaaggattatag

SEQ ID NO: 466 - DNA, 1542 bp, Artificial Sequence
  source: /note="Description of Artificial Sequence: Synthetic polynucleotide"
atgctatcgaagaacttgtacagtaacaagcggttgctcacctcgacgaacacgatggtgagattcgctagcaccagatccaccggggtcgaaaactccggagctggccctacatctttcaagaccatgaaagtcattgaccctcagcacagcgacaagccaaacgtgctgatactgggttcggggtggggcgctattagctttctgaagcacattgacaccaagaagtacaacgtctccatcatcagccctagaaagtatttcttacacacgcctttgttacctagcgccccagttgggaccgtagacgaaaagtcaattattgagcccatcgttaattttgctctcaagaaaaagggcaacgttacctactatgaggcagaggccaccagcatcaatcccgaccggaacaccgtgaccataaaaaacttatctgccgttagccagctataccaacccgagaaccacctagggctgcatcaagcagagcccgctgaaattaagtacgactatctgatcagcgctgtaggtgcggaacctaacacatttggaatccctggggtcaccgattacggccatttcctggaggaaattcccaactctttggaaataagaagaacttttgccgccaacctagaaaaggctaacctgctgccaaagggcgatcccgaaagaagaagactactgtccatcgtcgtggttggcggtggccctacaggtgtagaagccgctggtgaactacaggattatgtgcaccaggacctgagaaagttcttccctgcattggccgaagaagtccagattcacctggtcgaagccctgcccatcgtgttgaatatgttcgagaaggagctttcatcatacgcccaatcacatctggaaaacacttcgatcaaggtgcatctgagaacggccgtcgccaaagttgaagagaagcaactgttggccaagaccaaacacgaagacggtaaaataaccgaagaaactattccatacggtaccttgatttgggccaccggtaacaaggcaagaccggtaatcactgaccttttcaagaagattcctgagcagaacagctccaagagaggcttggcagtgaacgactttttgcaggtggagggcagcaacaacattttcgccattggcgacaacgcctttgctgggctgccacctacagcccaagtagcgcaccaagaggccgaatacttggccaagaatttcgataaaatggcccaaatccccaatttccaaaagaatctgtcttccagaaaggataaaattgacctcttgttcgaggagaacaactttaaacctttcaagtacaacgacttaggtgccttagcatacctgggatccgaaagagccattgcaaccataagatccggtaagagaacattttacaccggtggaggcctgatgaccttctacttatggcggattttgtacctgagcatgattctatctgccagaagcagactgaaggtctttttcgactggattaaaatggcatttttcaagagagacttttttaaaggcttatag

SEQ ID NO: 467 - DNA, 1542 bp, Artificial Sequence
  source: /note="Description of Artificial Sequence: Synthetic polynucleotide"
atgctatcgaagaatttgtatagcaacaagaggttgctcacctcgacgaacacgatggtcagattcgcttccaccagatccacaggggtcgaaaactccggagcaggtcctaccagctttaagaccatgaaagtcattgaccctcagcacagcgacaaaccaaacgtgctgatactgggttcggggtggggagctatcagctttttaaagcacattgacaccaagaagtacaacgttagcatcatctctcctagaaagtatttcttatttacgcctttgttacctagcgcaccagttgggaccgtagacgagaagtccattatcgagcccatcgttaactttgctctgaagaaaaaggggaacgtcacctactatgaggccgaagccacctctatcaaccccgaccggaataccgttaccatcaaatcactgtctgccgtttcccagctgtaccaacctgagaaccatctagggatgcatcaggccgaacccgctgagattaagtacgattacttaatcagcgccgtaggtgccgaacctaacacatttggaatccctggcgtcaccgattacggtcatttcttcaaggagattcccaactctctggaaataagaagaacttttgccgccaatctagagaaggccaacctgctgcctaagggtgatcccgaaagaagaagactgctgtccattgtcgtggttggtggaggccccactggcgtagaggctgctggtgaactacaggattatgttcaccaggacctgagaaagttcttccccgcattggccgaagaagtccaaattcacttggtcgaagccctgcccatcgtgttgaacatgtttgagaaaaagctttcatcatacgcccaatcacacttagaaaacacctcgatcaaagtgcatctgagaacggctgtcgccaaggttgaagaaaagcaattgctggcaaagaccaaacacgaggacggtaagataaccgaagaaactattccctacggtactttgatttgggccacgggtaacaaggcaagacccgtaatcactgaccttttcaagaaaattcctgagcagaactcgagcaagagaggcctggcagtgaacgactttttgcaggtcgagggcagcaacaacatcttcgccattggcgacaatgcatttagcgggctgccacctacagcccaggtagcgcaccaagaggccgagtatatcgccaagaacttcgataaaatggcccaaataccaaatttccaaaagaacctatcctcacggaaggataaaatcgatctcttgttcgaggaaaacaactttaaacctttcaaatacaacgacctgggcgccttagcatacctgggctccgaaagggccattgcaaccatccgttccggtaagagaacattttacaccggtggtggcctgatgaccttctacttatggcagattttgtacttgagcatgatcctgtctgcccgctcgagattaaaggtgtttttcgactggatcaaaatggcatttttcaaaagagacttctttaaaggactgtag

SEQ ID NO: 468 - DNA, 1542 bp, Artificial Sequence
  source: /note="Description of Artificial Sequence: Synthetic polynucleotide"
atgctatcgaagaatttgtacagtaacaagcggttgctcacctcgacgaataccatggtgcgcttcgctagcaccagatccaccggggtcgaaaactccggagctggccctacatcttttaagaccatgaaagtcatcgaccctcagcacagcgacaaacccaacgtgctgatcctgggttctgggtggggagctatctcgtttttaaagcacattgacaccaagaagtacaacgttagcatcatctctcccagaaagtatttcttatttacccccttgctgccctctgccccagttggaacagtagacgagaagtcaattatcgagcccatcgttaactttgccctcaagaaaaaggggaacgttacctactatgaggcagaggccacctctatcaatcccgacaggaataccgttaccataaaaagcttaagcgccgtgagccagctataccaacccgaaaaccatctggggctgcatcaagcagaacccgctgagattaagtacgactatctgatcagcgctgtaggtgcggaacccaacacctttggaattcctggcgtcactgattacggccatttcctggaggaaatccccaactctttggaaatcagacggacttttgccgccaacctagaggaggctaacttactgcctaagggtgatcccgaacggagaagactactgtccattgtcgtcgtgggtggtggccctactggtgtagaagccgctggtgaactacaggattacgtgcaccaggacctgagaaagttcctccctgcattggccgaagaagtgcaaattcacttggtggaagctctgcccatcgttttgaacatgtttgagaaagagctgagctcatacgcgcaaagccacttagaaaacacttcgatcaaagtgcatctgagaaccgctgtcgccaaagttgaagagaagcaactgctggcaaagaccaaacacgaagacggtaaaattaccgaggaaactattccatacggtactttgatttgggccacgggtaacaaggccagaccggtaatcactgacctgttcaagaaaattcctgagcaaaactcgagcaagcggggattggcagtgaatgactttttgcaggtggagggcagcaacaacatcttcgccatcggtgacaatgcatttgctgggttgccaccaaccgcccaggtagcccaccaagaagccgaatatatcgccaagaactttgataaaatggctcaaataccaaatttccaaaagaacctgtcttcaagaaaggataaaatcgatctcttgttcgaggaaaacaactttaaacccttcaaatacaacgatctgggcgccttagcatacctgggcagcgaaagggccattgccaccataagatccggtaagagaaccttttacaccggtggtggcttaatgaccttctacttatggagaattttgtacatgagcatgattctgtctgcaagatcgagactgaaggtctttttcgactggatcaagatggcatttttcaaaagagacttttttgagggactgtag

SEQ ID NO: 469 - DNA, 1542 bp, Artificial Sequence
  source: /note="Description of Artificial Sequence: Synthetic polynucleotide"
atgctgagcaagaatctgtacagtaaccggcggctgctcacctcgacgaacaccctagtgagattcgctagcaccagatccacaggggtggaaaacagcggggcaggtcctacaagctttaagaccatgaaagtcattgacccccagcacagcgacaagcccaacgtgctgatactgggctctgggtggggagctatcagctttctgaagcacattgacaccaagaagtacaacgtttccatcatctctcctagaaagtatttcttacacacgcccttgttaccttctgcaccagttgggacagtggacgaaaagtcaattattgagcccatcgtgaacttcgctctcaagaaaaagggcaacgttacctactatgaggcagaagccacctctatcaaccccgacaggaacaccgttaccatcaaatcattatctgccgttagccagctgtaccagcctgaaaaccatctgggcatgcatcaagcagaacctgctgaaattaagtacgactatttaatcagtgccgtgggtgcggaacctaacacatttggtattcctggggtcactgattacggtcatttcctggaggaaatccccaactctctggaaataagaagaactttcgccgccaatctagaaaaggctaacctgttgccaaagggcgatcccgaaagaagaaggctactgagcattgtcgtcgttggcggtggccctacaggtgtggaggccgctggtgagctacaggattatgtgcaccaggacctgagaaagttcttccctgcattggccgaagaagtgcagattcacctggtcgaagccctgcccatcgttttgaatatgtttgagaaaaagcttagctcatacgcccaatcacacttagaaaacacttcgatcaaagtgcatctgagaacggctgtggccaaggtggaagaaaagcaattgctggcaaagaccaaacacgaagacggtaaaataaccgaggaaaccattccctacggtactctgatttgggccaccggcaacaaggcaagacccgtaatcactgaccttttcaagaaaattcctgagcaaaactcgagcaagagaggattggcagtgaacgacttcttgcaggtcgagggcagcaacaacattttcgccattggcgacaacgcatttgctgggttgcctccaaccgcccaagtagcgcaccaggaggccgagtatatcgccaagaatttcgacaaaatggctcaaataccaaatttccaaaagaatctatcttcaagaaaggataaaattgatctcttgttcgaggagaacaacttcaaacctttcaagtacaacgatttaggtgccctggcatacctgggatccgaaagagccattgcaaccatacgtagcggtaagagaacattttacaccggtggaggcttaatgaccttctacttatggcggattctgtacatgagcatgattctatctgcacgcagcagattaaaggtctttttcgactggattaaattagccttcttcaaaagagactttttcgagggcttatag

SEQ ID NO: 470 - DNA, 1542 bp, Artificial Sequence
  source: /note="Description of Artificial Sequence: Synthetic polynucleotide"
atgctaagcaagaatttgtatagtaacaagcggttgctcacctcgacgaacaccatggtcagattcgcttccaccagatccacaggggtcgaaaactccggagcaggtcctacaagctttaagaccatgaaagtcattgaccctcagcacagcgacaaaccaaacgtgctgatactgggttcggggtggggagctatttcgtttttaaagcacatcgacaccaagaagtacaacgtttccatcatctctcctagaaagtatttcttatttacgcctttgttacccagcgcaccagttgggacagtagacgaaaagtcaattattgagcccatcgttaatttcgccctgaagaaaaaggggaacgtcacctactatgaggcagaggccacctctatcaatcccgaccggaataccgttaccatcaagaacctgtctgccgtgagccagctgtaccaacctgaaaaccatctgggcatgcaccaagcagaacccgctgaaattaagtacgactatttaatcagtgccgtaggcgcggaacccaacacctttggtatccccggcgtgactgattacggtcatttcctgaaggaaattcccaactctttggaaatcagaagaacttttgccgccaatctagaggaggctaacttattgccaaagggtgatcccgaaagaagaaggctactgagcattgtcgtggttggcggtgggcctacaggtgtagaagccgctggcgaactgcaggactacgttcaccaggacctgagaaagtttttccctgcattggccgaggaagtccaaattcacttggtcgaagctctgcccatcgttttgaatatgttcgagaagaagctttcaagctacgcgcaatcacacctggaaaacacctcgatcaaggtacacctgagaacggccgtcgccaaagttgaagagaagcaattgctggcaaagaccaagcacgaagacggcaaaataaccgaagaaaccatcccatacggtactttgatttgggccaccggcaacaaggccagaccggtaatcactgaccttttcaagaagatccctgagcaaaactcgagcaagagaggcttggccgtgaatgacttcttgcaggtgaaaggcagcaacaacattttcgccattggcgacaatgcatttgctggcctgccacctaccgcccaagtggcccaccaggaggccgaatatatcgccaagaattttgataaaatggctcaaataccaaatttccagaagaatctatcttccagaaaggataagattgacctcttgttcgaggagaacaacttcaaacctttcaagtacaacgacctgggtgccttagcatacctgggcagcgaaagggccattgccaccataagaagcggtaagcggaccttctacaccggtggtggcttaatgaccttctacctgtggcagattctgtacatgtccatgattctatctgcaagaagcagactgaaggtctttttcgactggatcaagatggcatttttcaaaagagacttctttaagggattatag

SEQ ID NO: 471 - DNA, 1542 bp, Artificial Sequence
  source: /note="Description of Artificial Sequence: Synthetic polynucleotide"
atgctatcgaagaatttgtatagtaaccggcggttgctgacctcgacgaacacgctagtccgcttcgcttccaccagatccacaggcgtcgaaaactccggagcaggtcctacctctttcaagaccatgaaagtcatcgaccctcagcacagcgacaaacccaacgtgctgatactgggttcggggtggggagccatctcgtttttaaagcacattgacaccaagaagtacaacgttagcatcatctctcctagaaagtatttcctgttcacgcccctgatgccttctgcaccagttgggaccgtagacgagaagtccattatcgagcccatcgtgaatttcgctctgaagaaaaaggggaacgttacctactatgaggcagaagccacctctatcaatcccgacaggaataccgtgaccataaaaaacttatctgccgttagccagctgtaccaacctgaaaaccatctgggcatgcaccaggccgaacctgctgagattaagtacgactatttaatcagtgccgtaggcgcggagcccaacacatttggtattcctggggtgactgattacggtcatttcttcaaggaaattcccaacagcttggaaatacggcggactttcgccgccaatctagaggaggctaacttactgccaaagggtgatcccgaacggagaagactactgtccattgtcgtcgtgggtggtggccctactggtgtagaggccgctggtgagctacaggattacgttcaccaggacctgcggaagtttctgcccgccttggccgaggaagtccagattcacttggtcgaagctctgcccatcgttttgaatatgttcgagaagaagctttcatcatacgcccaaagccatctggaaaacacttccatcaaagtgcatctgagaacggctgtcgccaaagttgaagaaaagcagttgttggcaaagaccaaacacgaggacggtaaaattaccgaagaaactattccatacggcactctgatttgggccaccggcaacaaggcaagaccggtgatcactgaccttttcaagaaaatccctgagcaaaactcgtccaagagaggattggcagtgaatgactttttgcaggtgaaaggcagcaacaacattttcgccattggcgacaacgcatttagcggcttgcctcctaccgcccaagtggcgcaccaagaggccgaatatatcgccaagaattttgacaagatggctcagatccccaatttccaaaagaacctatcttcaagaaaggataaaattgacctcttgttcgaggagaacaactttaagcctttcaaatacaacgatctgggtgccttagcatacctgggatccgaaagggccattgcaaccatccgttccggtaagagaacattttacaccggtggtggcttaatgaccttctacttatggagaattttgtacttgagcatgatcctaagcgcccgctcgagactgaaggtcttcttcgactggatcaaaatggcattcttcaagagagacttttttaaaggcctgtga

SEQ ID NO: 472 - DNA, 1542 bp, Artificial Sequence
  source: /note="Description of Artificial Sequence: Synthetic polynucleotide"
atgctaagcaagaatttgtacagtaacaagaggttgctcacctcgacgaacacgatggtcagattcgcttccaccagatccacaggggtggaaaactccggagctggtcctacatcttttaagaccatgaaagtcattgaccctcagcacagcgacaaaccaaacgtgctgatactgggctcgggctggggcgctatttcgtttttaaagcacattgacaccaagaagtacaacgtttccatcatctctcctagaagctatttcttacacacgcccttgatgcctagcgcaccagttgggaccgtggacgagaagtcaattattgagcccatcgtgaatttcgctctcaagaaaaaggggaacgttacctactatgaggccgaagccacctctatcaaccccgacaggaacaccgtgaccataaagtcactgagcgccgttagccagctgtaccagcctgaaaaccacctagggatgcaccaagcagaacctgctgaaattaagtacgactatttaatcagtgctgtaggtgcggaacccaacacctttggtattcctggggtcactgactacggtcatttcctgaaagaaattcccaacagcttggaaatacggagaaccttcgccgccaatctagaggaggccaacttactgcctaagggcgatcccgagcggagaagactactgagcatcgtggtggttggtggtggccctacaggtgtggaggctgctggtgagctacaggattatgttcaccaggacctgagaaagtttctccccgccttggccgaagaagtccaaattcacttggtcgaagctctgcccatcgttttgaatatgtttgagaagaagcttagctcatacgcgcaatcacatttagaaaacacttccatcaaagtacacctgagaaccgctgtggccaaggttgaagaaaagcagctgttggcaaagaccaaacacgaagacggtaaaattaccgaggaaactatcccctacggtaccttgatttgggccacgggcaacaaggcaagacccgtaatcaccgaccttttcaagaaaattcctgagcagaactcgtccaagagaggattggcagtgaatgacttcctgcaggtggagggcagcaacaacattttcgccattggtgacaatgcatttgccgggttgcctcctaccgcccaggtagcgcaccaggaagccgaatatctggccaagaattttgataaaatggcccaaataccaaatttccaaaagaatctatcttccagaaaggataagatcgatctcttgttcgaggaaaacaactttaaacctttcaagtacaacgacttaggcgccctggcctacctgggatccgaaagggccattgcaaccataagatccggtaagagaaccttttacaccggtggaggcttaatgaccttctacttatggcagattttgtacatgtccatgattctatctgcccgcagcagactgaaggtgtttttcgactggattaagatggcctttttcaagagagactttttcgagggactgtag

SEQ ID NO: 473 - DNA, 1542 bp, Artificial Sequence
  source: /note="Description of Artificial Sequence: Synthetic polynucleotide"
atgctaagcaagaatctgtatagtaacaagaggctgctcaccagcaccaatacgatggtcagattcgctagcaccagatccaccggggtggaaaactccggagctggtcccacatcttttaagaccatgaaggtcattgaccctcagcacagcgacaagccaaacgtgctgatactgggttcggggtggggagctatcagctttttaaagcacatcgacaccaagaagtacaacgtttccatcatctctcctagaaagtacttcttacacacgcctctgatgccctctgcaccagttgggacagtagacgaaaagtcaattattgagcccatcgttaactttgctctcaagaaaaaggggaacgttacctactatgaggcagaagccacctctatcaaccccgaccggaataccgtgaccataaagagcttatctgccgttagccagctataccaacctgaaaaccacctagggatgcaccaggcagagcctgctgagattaagtacgattatctgatcagtgccgtaggtgcggaacctaacacctttggtattcctggggtgaccgattacggccatttcctgaaggagatccccaactctttggaaataagaagaacttttgccgccaatctagagaaggccaacttattgcctaagggtgaccccgaaagaagaagactactgagcattgtcgtcgtgggcggagggcctactggcgtagaagccgctggtgagctacaggattatgttcaccaggacctgagaaagttcctgcctgcattggccgaagaagtccaaattcacttggtggaagctctgcccatcgttctgaatatgtttgagaaggagctttcatcatacgcgcagtcacacttagaaaacacttccatcaaagtgcacctgagaacggctgtcgccaaggttgaagaaaagcagctgctggcaaagaccaaacacgaagacggcaaaataaccgaagaaaccattccatacggtactctgatttgggccacgggcaacaaggcaagacccgtaatcactgaccttttcaagaaaatccctgagcaaaactcgagcaagagaggattggcagtgaatgactttctgcaggtgaaaggcagcaacaacattttcgccatcggcgacaacgcatttagcgggctgccaccaaccgcccaagtagcgcaccaggaggccgagtacttggccaagaactttgacaagatggcccagatacccaatttccaaaagaatctgtcttcacggaaggataagattgatctcttgttcgaggagaacaacttcaaacctttcaaatacaacgatttaggcgccttagcctacctgggctccgaaagggccattgccaccatacgttccggtaagagaaccttttacaccggcggaggcttaatgaccttctacttatggcagatcttgtacatgtccatgattctgtctgcaagatcgagattaaaggtgtttttcgactggattaaaatggcatttttcaaaagggacttttttaaaggactgtga

SEQ ID NO: 474 - DNA, 1542 bp, Artificial Sequence
  source: /note="Description of Artificial Sequence: Synthetic polynucleotide"
atgctatcgaagaatttgtatagtaacaagaggttgctgacctcgacgaacacgctagtccgcttcgcctccaccagatccacaggcgtggaaaacagcggggctggtcccacatcttttaagaccatgaaggtcatcgaccctcagcacagcgacaaacccaacgtgctgatcctgggctcggggtggggcgctattagctttttaaagcacattgacaccaagaagtacaacgtttccatcatcagccctagaaagtacttcttatttacgcctttgttacctagcgcaccagtggggacagtagacgagaagtcaatcatcgagcccatcgttaatttcgccctgaagaaaaaggggaacgttacctactatgaggcagaagccacctctatcaatcccgacaggaataccgttaccatcaagtcactgtctgccgtttcccagctataccaacctgagaaccacctaggcctgcatcaggccgaacccgccgagattaagtacgattatttaatcagtgctgtaggtgccgaacctaacacatttggaattcctggcgtgactgattacggtcatttcttcaaggaaattcccaactctttggaaataagaagaacttttgccgccaatctagaagaggctaacctgttgccaaagggtgaccccgaacggagaaggctactgtccattgtcgtcgttggtggtgggcccactggtgtagaagctgctggtgaactgcaggactatgttcaccaggacctgagaaagttcttccccgcattggccgaagaagtccaaattcacttggtggaagccctgcccatcgttctgaatatgtttgagaaagagctttcatcatacgcgcaatcacatttagaaaacacttcgatcaaagtacacctgagaacggctgtcgccaaagtggaagaaaagcaactgttggcaaagaccaaacacgaggacggtaaaataaccgaagaaactattccctacggcactctgatttgggccaccggtaacaaggcaagaccggtaatcactgaccttttcaagaagattcccgagcagaacagcagcaagagaggattggcagtgaacgactttttgcaggtggagggcagcaacaacattttcgccattggtgacaacgcctttagcgggttgccacctaccgcccaagtagcgcaccaagaggccgaatacctggccaagaattttgacaaaatggctcaaataccaaatttccaaaagaatctatcttcacggaaggataagattgacctcttgttcgaggaaaacaactttaagcctttcaaatacaacgatctgggtgccttagcctacctgggctccgaaagagccattgcaaccatccgtagcggtaagagaacattttacaccggtggtggcttaatgaccttctacttatggcagattttgtacatgagcatgattctatctgccagatcgagattaaaggtcttcttcgactggattaaattagccttcttcaagagagacttctttgagggcttatga

SEQ ID NO: 475 - DNA, 1542 bp, Artificial Sequence
  source: /note="Description of Artificial Sequence: Synthetic polynucleotide"
atgctatcgaagaatttgtacagtaacaagaggttgctcacctcgacgaacaccatggtcagattcgcttccaccagatccacaggcgtggaaaacagcggggctggtcctacaagctttaagaccatgaaagtcattgaccctcagcacagcgacaaacccaacgtgctgatactgggctcgggctggggagctattagctttttaaagcacattgacaccaagaagtacaacgtttccatcatctctcctagaaagtacttcttatttacgcccttgatgcctagcgcaccagttgggacagtagacgagaagtcaattattgagcccatcgttaactttgctctcaagaaaaagggcaacgttacctactacgaggcagaggccacctctatcaatcccgaccggaataccgtgaccataaaatcattaagcgccgtgtcccagctataccagcctgaaaaccacctaggcctgcatcaagcagaacccgctgaaattaagtacgattatctgatcagtgccgtgggtgcggaacccaacacatttggtattcctggggtgactgattacggccatttcctggaggagattcccaactctttggaaatacggagaactttcgccgccaatctagaagaggccaacttattgcctaagggtgaccccgaacggagaaggctgctgagcatcgtcgtcgtgggcggtgggcctactggcgtagaggctgctggtgaactgcaggactatgtgcaccaggacctgagaaagttcctccccgcactggccgaagaagtccaaattcacttggtcgaagctctgcccatcgttttgaacatgttcgagaaagagctttcatcatacgcgcaaagccatctggaaaacacttccatcaaagtgcatctgagaacggctgtcgccaaagttgaagaaaagcagttgttggccaagaccaagcacgaagacggtaaaattaccgaggaaactattccatacggcaccttgatttgggccacgggtaacaaggcaagaccggtaatcactgaccttttcaagaaaattcctgagcaaaactcgtccaagagaggactggcagtgaacgactttctgcaggtcgagggcagcaacaacattttcgccattggtgacaacgcctttagcggcttgccaccaacagcccaagtagcgcaccaagaggccgaatacctggccaagaactttgataaaatggctcaaatacccaatttccaaaagaatctatcttcacggaaggataaaatcgatctcttgttcgaggagaacaacttcaaacccttcaaatacaacgatttaggtgccttagcatacctgggatccgaaagggccattgcaaccatacgtagcggcaagagaaccttttacaccggcggaggcctgatgaccttctacttatggagaattttgtacttgagcatgattctatctgcaagaagcagattaaaggtctttttcgactggattaagttagccttcttcaaaagagacttctttgagggattatga

SEQ ID NO: 476 - DNA, 1542 bp, Artificial Sequence
  source: /note="Description of Artificial Sequence: Synthetic polynucleotide"
atgctatcgaagaatttgtatagtaacaagaggttgctcacctcgacgaatacgatggtccgcttcgcctccaccagatccacaggggtggaaaacagcggagcaggccctaccagcttcaagaccatgaaggtcattgacccccagcacagcgacaagccaaacgtgctgatactgggttcggggtggggagccatttcgtttttaaagcacatcgacaccaagaagtacaacgttagcatcatctctcctagaaagtacttcctgtttacgcctttgatgccttctgcaccagttggaaccgtagacgaaaagtccattattgagcccatcgttaactttgctctcaagaaaaagggcaacgttacctactacgaggccgaggccaccagcatcaaccccgacaggaataccgttaccataaaaaacctgtctgccgtgagccagctataccaacctgaaaaccatctagggctgcatcaagcagaacctgccgaaattaagtacgactatttaatcagtgctgtgggcgcggaacctaacacctttggtattcctggcgtcactgattacggccatttcctggaggaaattcccaactctttggaaataagaagaacttttgccgccaacctagaagaggccaacttactgccaaagggcgatcccgaaagaagaaggctgctgagcattgtggtggtgggtggtgggcctactggcgtagaggccgctggtgagctacaggattacgtgcaccaggacctgcggaagtttttccccgcattggccgaagaagtccaaattcacctggtggaagctctgcccatcgtgttgaatatgtttgagaaaaagctttcatcatacgcccaatcacacttagaaaacacttcgatcaaggtgcatctgagaaccgctgtggccaaagttgaagaaaagcaattgttggcaaagaccaaacacgaagacggtaagattaccgaggaaaccattccatacggtactctgatttgggccacgggtaacaaggcaagacccgtaatcaccgaccttttcaagaaaatccctgagcaaaactcgtccaagcggggattggcagtgaatgacttcttgcaggtggagggcagcaacaacattttcgccattggcgacaatgcctttgctggcttgccacctaccgcccaagtggcgcaccaagaagccgaatatttggccaagaattttgataagatggctcagataccaaatttccaaaagaatctatcttcacggaaggataaaatcgatctgttgttcgaggaaaacaactttaaacctttcaaatacaacgatctgggtgccttagcatacctgggctccgaaagggccattgccaccatcagatccggtaagcggaccttctacaccggtggaggcctgatgaccttctacttatggcagatcttgtacctgtccatgattctatctgcacgctcgagattaaaggtcttcttcgactggatcaaaatggcatttttcaaaagagacttttttaagggattatag

SEQ ID NO: 477 - DNA, 1542 bp, Artificial Sequence
  source: /note="Description of Artificial Sequence: Synthetic polynucleotide"
atgctatcgaagaatctgtatagtaacaagaggttgctcacctcgaccaataccctcgtcagattcgcttccaccagatccaccggggtggaaaacagcggagcaggtcctaccagcttcaagaccatgaaagtcattgacccccagcacagcgacaaaccaaacgtgctgatcctgggttcgggctggggcgctattagctttctgaagcacattgacaccaagaagtacaacgttagcatcatctctcctagaaagtatttcttatttacgcctctgatgccctctgccccagttggaacagtagacgaaaagtccattattgagcccatcgttaattttgccctcaagaaaaaggggaacgttacctactatgaggcagaagccacctctatcaaccccgaccggaataccgttaccataaagaacttaagcgccgtgtcccagctataccagcctgagaaccatctagggatgcaccaagcagagcctgctgaaattaagtacgattatttaatcagtgctgtaggtgccgagcccaacacctttggtattcccggcgtcactgattacggtcatttcctgaaagagattcccaactctttggaaatacggcggactttcgccgccaatctagaaaaggctaacttattgccaaagggcgatcccgaaagaagaaggctactgtccattgtcgtggtgggtggaggccctactggtgtggaggccgctggcgaactacaggactatgttcaccaggacctgagaaagttcttccccgcattggccgaagaagtccaaattcacctggtcgaagccctgcccatcgttttgaacatgttcgagaaggagctttcatcatacgcccaatcacatctggaaaacacttcgatcaaagtacatctgagaacggctgtcgccaaagttgaagaaaagcaactgttggccaagaccaagcacgaagacggtaaaataaccgaagaaactatcccctacggtactttgatttgggccacgggcaacaaggcaagacccgtaatcactgaccttttcaagaaaattcccgagcagaactcgtccaagcggggattggcagtgaatgactttttgcaggtcaaaggcagcaacaacattttcgccatcggtgacaatgcatttagcggcctgccaccaacagcccaagtagcccaccaagaggccgaatacttggccaagaattttgataagatggctcaaataccaaatttccagaagaatctatcttcaagaaaggataagattgatctcttgttcgaggaaaacaactttaaacctttcaaatacaacgatttaggcgccttagcatacctgggatccgaaagggccattgccaccatcagatccggtaagagaacattctacaccggtggtggcttaatgaccttctacctgtggcggattttgtacatgtccatgattctatctgcacgctcgagactgaaggtcttcttcgactggattaagatggcattcttcaagagggactttttcaaaggattatag

SEQ ID NO: 478 - DNA, 1542 bp, Artificial Sequence
  source: /note="Description of Artificial Sequence: Synthetic polynucleotide"
atgctatcgaagaatttgtatagtaacaagaggctgctcacctcgacgaacacgatggtcagattcgcctccaccagatccacaggggtggaaaactccggagctggtcccaccagctttaagaccatgaaagtcattgacccccagcacagcgacaaaccaaacgtgctgatactgggttcgggctggggcgctattagctttttaaagcacattgacaccaagaagtacaacgtttccatcatctctcccagaagctatttcctgcacacccctttgatgccttctgcccctgtggggacagtggacgaaaagtccatcattgagcccatcgttaattttgctctcaagaaaaaggggaacgttacctactatgaggcagaggccacctctatcaatcccgacaggaacaccgtgaccatcaagtcattaagcgccgtttcccagctataccaacctgaaaaccatctggggatgcatcaggcagaacctgctgagattaagtacgattatttaatcagtgctgtgggcgcggagcctaacacctttggtattcctggggtcactgactacggtcatttcctgaaagagatccccaactctttggaaatacggcggactttcgccgccaatctagaagaggccaacctgctgccaaagggtgatcccgaaagaagaaggctactgtccattgtcgtggttggtggtggccctactggtgtagaggccgctggtgaactgcaggactacgtgcaccaggacctgcggaagtttctccccgcattggccgaagaagtgcaaattcacttggtggaagctctgcccatcgtgctgaatatgtttgagaaagagctgagctcatacgcgcaatcacatttagaaaacacttcgatcaaagtacatctgagaacggctgtggccaaggttgaagaaaagcagttgctggcaaagaccaaacacgaagacggcaaaattaccgaagaaaccattccatacggtactttgatttgggccacgggtaacaaggcaagacccgtaatcaccgacctgttcaagaaaattcctgagcagaacagcagcaagagaggcttggcagtgaacgactttttgcaggtcaaaggcagcaacaacatcttcgccattggtgacaatgcctttgctggcctgccaccaaccgcccaagtagcccaccaagaagccgaatatttggccaagaattttgataaaatggcccaaataccaaatttccaaaagaacctatcttccagaaaggataagatcgatctcctgttcgaggaaaacaacttcaaacccttcaaatacaacgatttaggcgccttagcctacctgggatccgaaagggccattgcaaccataagatccggtaagagaacattttacaccggtggaggcttaatgaccttctacttatggcagatcttgtacatgtccatgatcctatctgcacgctcgagattaaaggtctttttcgactggattaaaatggcatttttcaaaagggacttttttgagggattatag

SEQ ID NO: 479 - DNA, 1542 bp, Artificial Sequence
  source: /note="Description of Artificial Sequence: Synthetic polynucleotide"
atgctaagcaagaacttgtacagtaacaagaggctgctgacctcgacgaatacgctcgtcagattcgcctccaccagatccacaggggtcgaaaactccggagcaggtcctacaagctttaagaccatgaaagtcattgaccctcagcacagcgacaaacccaacgtgctgatactgggctctgggtggggagctatttcgtttctgaagcacattgacaccaagaagtacaacgtctccatcatcagccctagaaagtatttcttatttacgcccttgttaccttctgcacctgttggaacagtggacgaaaagtcaattatcgagcccatcgttaatttcgctctcaagaaaaaggggaacgttacctactacgaggccgaagccaccagcatcaatcccgacaggaataccgttaccatcaagaacttaagcgccgtttcccagctataccaacctgagaaccacctagggatgcaccaggccgagcctgccgaaattaagtacgattacttaatcagcgctgtaggcgcggaacctaacacctttggaattcccggggtcactgattacggtcatttcttcgaggaaattcccaactctctggaaataagaagaacttttgccgccaacctagagaaggctaacttattgccaaagggtgatcccgaacggagaagactactgtccattgtggtggttggcggtgggcctactggtgtagaagccgctggcgagctacaggattacgttcaccaggacctgagaaagtttttccctgcactggccgaagaagtccaaattcacttggtggaagctctgcccatcgttctgaacatgttcgagaaagagctttcaagctacgcgcaaagccacttagaaaacacctcgatcaaagtgcatctgagaacggctgtcgccaaggttgaagagaagcaattgttggcaaagaccaagcacgaagacggtaagattaccgaggaaactattccctacggtaccctgatttgggccaccggtaacaaggcaagacccgtaatcactgaccttttcaagaagattcctgagcaaaacagctccaagagaggcttggcagtgaatgactttttgcaggtgaaaggcagcaacaacattttcgccattggcgacaatgcatttagcgggctgccacctacagcccaagtagcccaccaagaggccgaatacttggccaagaattttgataaaatggctcaaataccaaatttccaaaagaatctgtcctcaagaaaggataaaattgacctcctgttcgaggagaacaactttaaacctttcaagtacaacgacttaggtgccctggcatacctgggatccgaaagggccattgcaaccataagaagcggtaagagaacattttacaccggtggaggcttaatgaccttctacttatggagaattttgtacatgtccatgatcctgtctgcaagaagcagattaaaggtctttttcgactggattaagatggcctttttcaagagggacttttttaaaggattatga

SEQ ID NO: 480 - DNA, 1542 bp, Artificial Sequence
  source: /note="Description of Artificial Sequence: Synthetic polynucleotide"
atgctatcgaagaatttgtatagtaaccggaggctgctgaccagcaccaatacgatggtcagattcgcttccaccagatccacaggcgtcgaaaactccggggcaggtcccacctcttttaagaccatgaaagtcattgaccctcagcacagcgacaaacccaacgtgctgatcctgggctctggctggggagctatttcgtttctgaagcacattgacaccaagaagtacaacgtttccatcatctctcctagaaagtacttcctgtttacgcctttgatgccctctgcacctgttgggacagtagacgagaagtcaattattgagcccatcgttaactttgctctcaagaaaaagggcaacgttacctactacgaggcagaagccacctctatcaatcccgacaggaataccgttaccataaaaaacttaagcgccgtgagccagctataccagcctgaaaaccatctaggcctgcatcaagccgaacccgccgaaattaagtacgattacttaatcagtgctgtgggcgcggaacctaacacatttggaattcctggcgtcactgattacggtcatttcttcaaagaaattcccaactctctggaaatcagacggacttttgccgccaatctagagaaggctaacctgctgcctaagggtgatcccgaacggagaagactactgtccattgtggtcgttggcggtggccccactggtgtagaagctgctggtgaactacaggattacgttcaccaggacctgcggaagttcctccccgccttggccgaggaagtgcaaattcacctggtggaagccctgcccatcgttttgaatatgtttgagaaagagctttcatcatacgcgcagtcacatttagaaaacacttcgatcaaggtgcatctgagaacggctgtcgccaaagtggaagagaagcaattgctggcaaagaccaaacacgaagacggtaaaattaccgaggaaactattccctacggtactttgatttgggccacgggtaacaaggcaagaccggtaatcaccgaccttttcaagaaaattcctgagcaaaactcgtccaagagaggattggcagtgaatgactttttgcaggtggagggcagcaacaacattttcgccattggcgacaatgcatttgctggcttgccacctacagcccaagtagcccaccaagaggccgaatatctggccaagaactttgataaaatggctcaaatacccaatttccaaaagaacctgtcttcaagaaaggataaaattgacctcttgttcgaggagaacaactttaaacctttcaaatacaacgatctgggtgccctggcatacctgggatccgaaagagccattgccaccatccgtagcggtaagagaacattttacaccggtggaggcctgatgaccttctacttatggcagatcctgtacttgtccatgatcctatctgcccgcagcagattaaaggtctttttcgactggatcaaattagcattcttcaaaagagactttttcgagggcttatag

SEQ ID NO: 481 - DNA, 1542 bp, Artificial Sequence
  source: /note="Description of Artificial Sequence: Synthetic polynucleotide"
atgctgtcgaagaatttgtacagtaaccggaggttgctcacctcgacgaataccatggtgcgcttcgcttccaccagatccacaggcgtcgaaaactccggggcaggtcccacatcttttaagaccatgaaagtcatcgacccccagcacagcgacaagccaaacgtgctgatcctgggttcggggtggggcgctatctcgtttttaaagcacattgacaccaagaagtacaacgtttccatcatctctcctagaaagtacttcctgtttacgcccctgctgccttctgcaccagtgggaacagtggacgaaaagtccattatcgagcccatcgtgaattttgctctcaagaaaaaggggaacgttacctactacgaggcagaagccaccagcatcaatcccgacaggaacaccgtgaccataaaaagcttatctgccgttagccagctgtaccaacccgaaaaccatctaggcatgcaccaagcagaacctgccgagattaagtacgactatttaatcagtgctgtgggtgccgaacctaacacatttggtatccctggggtcactgattacggtcatttcttcgaggaaattcccaacagcttggaaatacggcggactttcgccgccaatctagaggaggccaacttattgccaaagggcgatcccgaaagaagaagactactgtccatcgtggtggttggtggagggcctactggcgtggaggccgctggtgagctgcaggactatgtgcaccaggacctgagaaagttcctccccgcattggccgaggaagtccaaattcacttggtggaagctctgcccatcgttttgaacatgtttgagaagaagctttcatcatacgcgcaaagccatttagaaaacacctcgatcaaggtacatctgagaacggctgtggccaaagtggaagaaaagcaattgttggcaaagaccaaacacgaggacggtaaaataaccgaagaaaccatcccatacggtactctgatttgggccacgggtaacaaggcaagaccggtaatcaccgaccttttcaagaagattcctgagcaaaactcgtccaagagaggattggccgtgaatgacttcttgcaggtgaaaggcagcaacaacatcttcgccatcggtgacaatgcatttgctggcctgccacctacagcccaagtggcgcaccaagaggccgagtatatcgccaagaattttgataaaatggcccaaataccaaatttccaaaagaatctgtcctcaagaaaggataagattgatctcttgttcgaggaaaacaactttaagcccttcaaatacaacgatctgggcgccttagcatacctgggatccgaaagagccattgcaaccatacgttccggtaagagaaccttttacaccggtggtggcttaatgaccttctacttatggagaatcttgtacatgtccatgattctaagcgcaagatcgagattaaaggtcttcttcgactggattaagttagcatttttcaaaagagacttttttgagggcttatag

SEQ ID NO: 482 - DNA, 1542 bp, Artificial Sequence
  source: /note="Description of Artificial Sequence: Synthetic polynucleotide"
atgctaagcaagaatctgtacagcaacaagaggttgctgacctcgaccaacaccatggtgcgcttcgctagcaccagatccaccggggtggaaaacagcggagctggtcctacctctttcaagaccatgaaagtcatcgacccccagcacagcgacaaaccaaacgtgctgatcctgggttcggggtggggagccatcagctttctgaagcacatcgacaccaagaagtacaacgtctccatcatcagccccagaaagtatttcttattcacccctttgctgcccagcgccccagttggaaccgtagacgaaaagtcaattatcgagcccatcgtgaacttcgctctcaagaaaaagggcaacgttacctactacgaggccgaggccaccagcatcaatcccgaccggaacaccgttaccataaagaacttaagcgccgtgtcccagctataccaacctgagaaccacctgggcatgcaccaagccgagcctgccgagattaagtacgattatctgatcagcgccgtgggcgcggaacctaacacctttggaatccccggcgtgaccgactacggccacttcctgaaggagatccccaactctctggaaatccggagaaccttcgccgccaacctggaaaaggccaacctgctgccaaagggtgaccccgagagaagaaggctactgagcatcgtggtggttggcggagggcctactggcgtggaagccgctggtgaactacaggactatgtgcaccaggacctgcggaagttcttccccgccctggccgaagaagtccaaattcacctggtcgaagctctgcccatcgtgttgaacatgttcgagaagaagctgtcatcatacgcgcagagccacttagaaaacacctcgatcaaggtgcatctgagaacggccgtggccaaggtggaagagaagcagctgttggccaagaccaaacacgaggacggcaaaattaccgaggaaactatcccatacggcactttgatttgggccacgggcaacaaggcaagaccggtgatcaccgacctgttcaagaagatccctgagcagaacagcagcaagagaggattggccgtgaacgactttttgcaggtcgagggcagcaacaacatcttcgccattggtgacaatgcctttgctggcttgcctccaaccgcccaggtagcgcaccaggaagccgagtatatcgccaagaacttcgataagatggcccaaatacccaatttccagaagaacctgtcttcccggaaggataagatcgacctgctgttcgaggaaaacaacttcaagcctttcaagtacaacgatctgggtgccttagcatacctgggaagcgaaagagccattgccaccatcagatccggtaagcggacattctacaccggtggaggcctgatgaccttctacctgtggcagatcctgtacctgagcatgattctgagcgcaagaagcagattaaaggtgttcttcgactggattaaattagccttcttcaaaagagacttcttcgagggcttatga

SEQ ID NO: 483 - DNA, 1542 bp, Artificial Sequence
  source: /note="Description of Artificial Sequence: Synthetic polynucleotide"
atgctatcgaagaatctgtacagcaacaagcggctgctcacctcgaccaatacgatggtccgcttcgccagcaccagatccaccggcgtggaaaactccggagctggccctaccagcttcaagaccatgaaggtcatcgacccccagcacagcgacaagcccaacgtgctgatcctgggctcgggctggggagccatctcgtttttaaagcacatcgacaccaagaagtacaacgtcagcatcatctctcccagaaagtacttcttattcacgcccctgctgccctctgcacctgtggggaccgtggacgagaagtcaatcattgagcccatcgtgaacttcgccctcaagaaaaagggcaacgttacctactacgaggcagaggccacctctatcaatcccgacaggaacaccgttaccatcaaaaacttaagcgccgttagccagctgtaccagcctgagaaccacctagggatgcatcaggcagaacccgccgaaattaagtacgactacttaatcagtgccgtaggcgccgagcccaacacctttggaatccctggcgtgaccgactacggtcacttcttcgaggagatccccaactctctggaaatccggcggacttttgccgccaacctggaaaaggccaacttattgccaaagggtgaccccgagcggagaaggctactgagcatcgtggtcgttggtggaggccccactggcgtagaggctgctggcgaactgcaggactacgttcaccaggacctgcggaagttcttccccgccctggccgaggaagtccaaattcacctggtcgaagccctgcccatcgttctgaatatgttcgagaaaaagcttagcagctacgcgcaatcacacttagaaaacacctcgatcaaagtgcatctgagaacggccgtggccaaagttgaagagaagcagctgttggccaagaccaaacacgaggacggcaagattaccgaagaaactattccatacggcaccctgatttgggccacgggtaacaaggccagacccgtgatcaccgacctgttcaagaaaatccctgagcaaaacagctccaagcggggcttggccgtgaacgacttcttgcaggtcgagggcagcaacaacattttcgccattggcgacaatgcctttagcggcctgccacctaccgcccaggtagcccaccaagaagccgaatatctggccaagaacttcgacaagatggcccagatacccaatttccagaagaatctatcttcccggaaggataagattgacctgttgttcgaggaaaacaacttcaagcctttcaaatacaacgatttaggcgccctggcatacctgggaagcgaaagagccattgccaccatcagaagcggtaagagaacattctacaccggtggtggcctgatgaccttctacctgtggcggatcttgtacatgtccatgattctgagcgcccgctcgagattaaaggtgttcttcgactggatcaaactggccttcttcaagagggactttttcaaaggcctgtga

SEQ ID NO: 484 - DNA, 1542 bp, Artificial Sequence
  source: /note="Description of Artificial Sequence: Synthetic polynucleotide"
atgctgtcgaagaatctgtatagcaaccggcggctgctgacctcgaccaacaccatggtgcgcttcgccagcaccagatccacaggggtcgaaaacagcggggctggccccaccagcttcaagaccatgaaggtcatcgacccccagcacagcgacaagcccaacgtgctgatcctgggctcgggctggggagctattagctttctgaagcacattgacaccaagaagtacaacgttagcatcatctctcccagaaagtacttcttatttacccccctgctgcctagcgcccctgttggaaccgtggacgagaagtccatcatcgagcccatcgttaacttcgctctcaagaaaaaggggaacgttacctactacgaggccgaggccaccagcatcaaccccgacaggaacaccgtgaccatcaaaaacttaagcgccgtgagccagctgtaccagcctgagaaccacctgggcctgcaccaagcagagcccgctgaaattaagtacgactacttaatcagcgctgtgggcgccgagcccaacacctttggaatccccggggtgaccgactacggtcacttcttcaaggaaattcccaactctttggaaatcagaagaacttttgccgccaacctggaggaggccaacttactgcctaagggtgatcccgagcggagaaggctactgagcattgtggtcgttggtggaggccctactggcgtggaagctgctggcgagctgcaggactatgtgcaccaggacctgcggaagttcctccctgccctggccgaagaagtccaaattcacctggtcgaagctctgcccatcgttctgaatatgttcgagaaagagctgagcagctacgcccagtcacacctggaaaacacctcgatcaaagtgcacctgagaaccgctgtggccaaggtggaagagaagcaattgctggcaaagaccaagcacgaggacggtaagattaccgaggaaactattccatacggcactctgatttgggccacgggtaacaaggccagaccggtgatcactgaccttttcaagaagatccctgagcagaacagcagcaagagaggattggccgtgaatgactttctgcaggtcgagggcagcaacaacattttcgccatcggcgacaatgcatttgctgggttgcctcctacagcccaggtggcgcaccaagaggccgagtatatcgccaagaactttgacaagatggcccagatccccaatttccagaagaacctatcttcacggaaggataaaattgatctgctgttcgaggaaaacaactttaaacctttcaaatacaacgatttaggtgccctggcctacctgggcagcgaaagagccattgcaaccataagaagcggtaagcggaccttctacaccggcggtggcctgatgaccttctacctgtggcggatcctgtacttgagcatgatcctgagcgcacgcagcagattaaaggtgtttttcgactggattaagctggcctttttcaaaagggactttttcgagggactgtag

SEQ ID NO: 485 - DNA, 1542 bp, Artificial Sequence
  source: /note="Description of Artificial Sequence: Synthetic polynucleotide"
atgctatcgaagaatctgtatagcaaccggcggctgctgacctcgaccaataccatggtgcgcttcgcctccaccagatccacaggggtcgaaaacagcggggcaggccccaccagctttaagaccatgaaagtcatcgacccccagcacagcgacaagcccaacgtgctgatcctgggctcgggctggggcgccatctcgtttctgaagcacatcgacaccaagaagtacaacgtctccatcatcagccctagaaagtacttcctgttcacgcccctgatgcctagcgcccctgtgggaacagtagacgaaaagtccattattgagcccatcgttaactttgccctcaagaaaaaggggaacgttacctactacgaggcagaagccacctctatcaaccccgacaggaataccgttaccataaaaagcctgagcgccgttagccagctgtaccagcccgaaaaccatctagggctgcaccaggcagagcccgccgagattaagtacgattacctgatcagtgccgtgggtgccgagcctaacacatttggaattcccggcgtcactgattacggccatttcttcaaagagatccccaacagcctggaaatcagaagaactttcgccgccaacctagagaaggccaacctgctgccaaagggcgaccccgaacggagaaggctgctgtccattgtggtcgttggcggtgggcctactggcgtagaagctgctggcgagctacaggactacgtgcaccaggacctgcggaagtttctgcctgcattggccgaggaagtgcagattcacctggtcgaagccctgcccatcgtgctgaacatgttcgagaaggagctgagctcatacgcccagagccatctggaaaacacctccatcaaggtgcatctgagaacggccgtggccaaagtggaagaaaagcagctgttggcaaagaccaagcacgaagacggcaaaataaccgaagaaactatcccctacggtactttgatttgggccaccggcaacaaggccagacccgtgatcaccgaccttttcaagaaaatccccgagcagaacagcagcaagcggggcctggccgtgaatgactttctgcaggtcgagggcagcaacaacatcttcgccatcggtgacaacgcatttagcggcttgccaccaaccgcccaggtagcccaccaggaagccgagtatttggccaagaacttcgacaagatggcccaaatcccaaatttccagaagaacctgtcctccagaaaggataaaatcgatctgctgttcgaggaaaacaacttcaagcctttcaaatacaacgacctgggcgccctggcatacctgggcagcgaaagagccattgcaaccataagatccggtaagcggacattctacaccggtggaggcctgatgaccttctacctgtggcagatcctgtacctgagcatgattctatctgcccgcagcagactgaaggtctttttcgactggatcaagttagcctttttcaagagagacttctttaagggattatga

SEQ ID NO: 486 - DNA, 1542 bp, Artificial Sequence
  source: /note="Description of Artificial Sequence: Synthetic polynucleotide"
atgctgagcaagaacttgtatagcaacaagaggctgctcacctcgaccaacacgctagtgagattcgctagcaccagatccaccggggtcgaaaactccggagctggccccaccagcttcaagaccatgaaagtcatcgacccccagcacagcgacaagcccaacgtgctgatcctgggttctgggtggggcgccatctcgtttctgaagcacatcgacaccaagaagtacaacgtcagcatcatctctcctagaagctacttcctgttcacgcccctgatgcccagcgcccctgttgggacagtagacgagaagtcaatcattgagcccatcgttaactttgccctgaagaaaaaggggaacgttacctactacgaggcagaggccacctctatcaatcccgaccggaataccgtgaccataaagagcctgtctgccgtgtcccagctataccaacccgaaaaccacctagggctgcaccaggcagagcctgctgagattaagtacgactatctgatcagtgccgtgggtgcggaacccaacacatttggaattcctggcgtcactgactacggccacttcttcgaggagatccccaacagcctggaaatcagacggacctttgccgccaatctagaagaggccaacctgctgcctaagggtgaccccgaacggagaaggctactgagcatcgtggtggtgggtggaggccctactggtgtggaagctgctggcgagctgcaggactacgttcaccaggacctgcggaagttcctccccgccctggccgaggaagtgcagattcacctggtggaagccctgcccatcgtgttgaacatgttcgagaaagagcttagctcatacgcccagagccacctggaaaacacctcgatcaaggtacacctgagaaccgccgtggccaaggttgaagaaaagcagttgctggccaagaccaagcacgaagacggcaagataaccgaggaaactattccatacggcaccctgatttgggccaccggcaacaaggccagacccgtgatcactgacctgttcaagaagattcctgagcagaacagcagcaagagaggactggccgtgaatgacttcctgcaggtggagggcagcaacaacatcttcgccattggcgacaacgcctttgctgggctgcctccaaccgcccaagtggcccaccaagaagccgagtacatcgccaagaactttgacaagatggcccagataccaaatttccaaaagaatctgtcttcacggaaggataagatcgatctcttgttcgaggagaacaacttcaaacccttcaagtacaacgacctgggcgccttagcctacctgggatccgaaagggccattgccaccataagaagcggtaagagaaccttttacaccggcggaggcctgatgaccttctacctgtggcagatcctgtacatgagcatgattctaagcgcacgctcgagactgaaggtgttcttcgactggatcaagatggcctttttcaaaagggacttctttaaaggactgtag

SEQ ID NO: 487 - DNA, 1542 bp, Artificial Sequence
  source: /note="Description of Artificial Sequence: Synthetic polynucleotide"
atgctgagcaagaacctgtatagtaacaagcggttgctgaccagcaccaatacgatggtgcgcttcgccagcaccagatccaccggcgtcgaaaactccggggctggccccaccagcttcaagaccatgaaggtcattgaccctcagcacagcgacaagcccaacgtgctgatactgggttctggctggggagctatcagctttctgaagcacattgacaccaagaagtacaacgttagcatcatcagccctagaaagtacttcttacacacccccctgatgcccagcgcaccagtgggaacagtggacgaaaagtccatcattgagcccatcgtgaatttcgctctcaagaaaaaggggaacgtcacctactacgaggcagaggccacctctatcaaccccgaccggaataccgtgaccataaaaaacttaagcgccgtgagccagctgtaccagcccgaaaaccatctggggctgcatcaagccgagcccgccgaaattaagtacgactacctgatcagcgccgtaggcgccgagcccaacacctttggtatccctggcgtgactgattacggtcacttcctgaaggaaattcccaactctttggaaataagaagaaccttcgccgccaacctagaagaggctaacctgctgcctaagggtgatcccgagcggagaaggctgctgagcatcgtggtggtgggcggaggccccacaggcgtggaagctgctggcgaactgcaggactacgttcaccaggacctgagaaagtttctccccgccttggccgaagaagtgcaaattcacttggtcgaagctctgcccatcgttttgaatatgtttgagaagaagctgtcaagctacgcccagtcacatctggaaaacacttccatcaaggtgcacctgagaacggctgtggccaaggtggaagagaagcagctgctggccaagaccaaacacgaggacggcaagattaccgaggaaaccattccatacggtaccttgatttgggccacgggcaacaaggccagacccgtgatcaccgacctgttcaagaagatccccgagcagaactcgagcaagcggggactggcagtgaacgactttttgcaggtggagggcagcaacaacattttcgccattggtgacaacgcctttagcggcttgccaccaacagcccaagtggcccaccaagaggccgagtatctggccaagaacttcgataagatggcccagatccccaatttccagaagaatctgtcctccagaaaggataaaattgacctgttgttcgaggagaacaactttaagcccttcaagtacaacgacttaggcgccttagcctacctgggctccgaaagggccattgccaccatcagatccggtaagcggacattctacaccggcggaggcctgatgaccttctacctgtggagaatcttgtacatgtccatgatcctgtctgcccgcagcagactgaaggtcttcttcgactggattaagatggcatttttcaaaagagacttctttaagggcctgtga

SEQ ID NO: 488 - DNA, 1542 bp, Artificial Sequence
  source: /note="Description of Artificial Sequence: Synthetic polynucleotide"
atgctatcgaagaatctgtacagcaaccggcggctgctcacctcgacgaacaccatggtgcgcttcgcctccaccagatccaccggggtcgaaaactccggggctggccccacctcttttaagaccatgaaggtcatcgacccccagcacagcgacaagcccaacgtgctgatcctgggttcggggtggggagccatcagctttctgaagcacattgacaccaagaagtacaacgtctccatcatcagccccagaagctacttcttattcacgcccttgttaccctctgcccctgttgggacagtagacgaaaagtccatcatcgagcccatcgtgaactttgccctgaagaaaaagggcaacgtcacctactatgaggcagaggccaccagcatcaatcccgaccggaacaccgttaccatcaaaagcctgtctgccgtgtcccagctgtaccaacccgaaaaccacctagggctgcaccaggccgaacccgctgaaattaagtacgactacctgatcagtgccgtaggtgccgagcccaacacctttggtattcctggggtcaccgattacggtcacttcctggaggaaattcccaacagcttggaaatccggagaacctttgccgccaatctggaggaggctaacttattgccaaagggcgatcccgagcggagaaggctactgagcattgtggtcgtgggcggtggccccacaggcgtggaggccgctggcgagctgcaggattatgttcaccaggacctgcggaagttcttccccgccttggccgaggaagtccaaattcacctggtcgaagccctgcccatcgtgctgaatatgtttgagaaggagctgagcagctacgcccagtcacacctggaaaacacctcgatcaaagtgcacctgagaaccgctgtggccaaagtggaagagaagcagttgttggccaagaccaagcacgaggacggcaagataaccgaggaaactattccctacggtaccttgatttgggccacgggcaacaaggcaagaccggtaatcactgacctgttcaagaagattcctgagcaaaacagcagcaagcggggactggcagtgaacgacttcttgcaggtcgagggcagcaacaacatcttcgccatcggcgacaacgcctttgctggcctgcctcctacagcccaggtagcgcaccaggaggccgaatatctggccaagaattttgacaaaatggcccaaatccccaatttccagaagaacctgtcctcccggaaggataagattgacctgctgttcgaggaaaacaacttcaaacctttcaagtacaacgatttaggtgccctggcatacctgggcagcgaaagagccattgcaaccatcagaagcggcaagcggaccttttacaccggcggaggcttaatgaccttctacctgtggcggatcctgtacatgagcatgattctatctgcccgcagcagactgaaggtgttcttcgactggatcaagatggcatttttcaaaagggacttcttcgagggcctgtga

SEQ ID NO: 489 - DNA, 1542 bp, Artificial Sequence
  source: /note="Description of Artificial Sequence: Synthetic polynucleotide"
atgctgtcgaagaatttgtatagcaacaagaggctgctgacctcgacgaacacgctagtgagattcgccagcaccagatccacaggggtggaaaacagcggagcaggccctacaagcttcaagaccatgaaggtcatcgaccctcagcacagcgacaagccaaacgtgctgatactgggttctggctggggcgctattagctttttaaagcacatcgacaccaagaagtacaacgtcagcatcatcagccctagaaagtacttcctgcacacgcccctgctgcccagcgcacctgtgggaaccgtagacgagaagtccatcatcgagcccatcgttaacttcgccctcaagaaaaagggcaacgttacctactacgaggccgaggccacctctatcaatcccgaccggaacaccgtgaccatcaagtcactgagcgccgtttcccagctataccaacctgaaaaccacctggggctgcaccaggcagagcccgctgagattaagtacgactacctgatcagcgccgtaggtgccgagcccaacacctttggaatccccggcgtcaccgattacggtcacttcttcgaggagatccccaacagcctggaaatccggcggacctttgccgccaatctggaagaggctaacttactgcctaagggtgaccccgaaagaagaaggctactgagcatcgtggtcgtgggcggtggccccacaggtgtggaagctgctggtgagctacaggattacgtgcaccaggacctgcggaagttcctgcctgcattggccgaagaagtccagattcacctggtcgaagccctgcccatcgtgctgaacatgtttgagaaggagctgtcatcatacgcccaatcacatctggaaaacacttccatcaaagtacatctgagaaccgccgtcgccaaggttgaagagaagcaactgctggccaagaccaagcacgaggacggtaaaataaccgaggaaaccattccatacggcaccctgatttgggccaccggtaacaaggccagaccggtaatcactgacctgttcaagaagatccctgagcaaaacagcagcaagagaggcctggcagtgaacgacttcctgcaggtcaaaggcagcaacaacattttcgccatcggtgacaacgcctttagcgggctgcctccaacagcccaggtggcgcaccaagaagccgagtacatcgccaagaatttcgacaaaatggcccagataccaaatttccaaaagaacctgtcctcccggaaggataagattgacctgctgttcgaggagaacaacttcaagcctttcaagtacaacgacttaggcgccttagcctacctgggcagcgaaagagccattgccaccataagaagcggcaagagaacattttacaccggcggtggcctgatgaccttctacctgtggcagatcctgtacctgtccatgattctaagcgccagaagcagactgaaggtctttttcgactggatcaaattagcattcttcaaaagggacttcttcaaaggattatga

SEQ ID NO: 490 - DNA, 1542 bp, Artificial Sequence
  source: /note="Description of Artificial Sequence: Synthetic polynucleotide"
atgctgagcaagaacctgtacagcaacaagaggttgctgaccagcaccaacaccatggtgagattcgcctccaccagatccacaggcgtggaaaactccggagctggtcctacctcttttaagaccatgaaggtcattgacccccagcacagcgacaaaccaaacgtgctgatactgggctcgggctggggagccatctcgtttttaaagcacatcgacaccaagaagtacaacgtcagcatcatcagccctagaagctatttcctgttcacccctttgatgcctagcgcaccagttggaaccgtggacgagaagtccatcatcgagcccatcgtgaatttcgccctgaagaaaaagggcaacgttacctactacgaggccgaggccacctctatcaaccccgacaggaacaccgtgaccatcaagagcctgagcgccgtgtcccagctgtaccagcccgaaaaccatctggggctgcatcaggcagagcccgccgagattaagtacgattatctgatcagcgctgtaggtgccgagcctaacacctttggtattcctggggtcaccgactacggccatttcttcaaagagatccccaactctctggaaatccggcggaccttcgccgccaatctggaaaaggccaacctgttgccaaagggcgaccccgaacggagaaggctgctgagcatcgtggtcgtgggtggtggccccacaggcgtagaggctgctggcgagctacaggactatgtgcaccaggacctgcggaagttcttccccgcactggccgaagaagtgcaaattcacctggtcgaagctctgcccatcgtgctgaacatgtttgagaaagagctgagcagctacgcccaaagccacctggaaaacacctccatcaaggtgcacctgagaacggccgtggccaaagttgaagagaagcaattgctggccaagaccaaacacgaggacggtaagataaccgaagaaaccattccctacggcactctgatttgggccaccggcaacaaggcaagaccggtaatcaccgaccttttcaagaagattcctgagcaaaacagcagcaagcggggcttggccgtgaacgactttttgcaggtcgagggcagcaacaacattttcgccattggcgacaacgcatttagcggcttgcctcctacagcccaggtagcccaccaggaggccgagtatttggccaagaactttgataaaatggctcaaatacccaatttccagaagaatctatcctcacggaaggataagatcgatctgctgttcgaggagaacaacttcaaacccttcaagtacaacgatctgggtgccttagcctacctgggcagcgaaagagccattgccaccatcagatccggcaagcggaccttttacaccggtggaggcctgatgaccttctacctgtggcagattttgtacttgagcatgattctaagcgcccgcagcagattaaaggtgtttttcgactggatcaagatggcctttttcaagagagacttctttgagggactgtga

SEQ ID NO: 491 - DNA, 1542 bp, Artificial Sequence
  source: /note="Description of Artificial Sequence: Synthetic polynucleotide"
atgctgagcaagaacctgtacagtaaccggaggttgctgacctcgaccaacacgctcgtccgcttcgcttccaccagatccacaggcgtggaaaacagcggagcaggtcctaccagctttaagaccatgaaggtcatcgacccccagcacagcgacaagccaaacgtgctgatcctgggctctgggtggggcgctattagctttttaaagcacatcgacaccaagaagtacaacgtcagcatcatctctcctagaaagtacttcctgttcacccctttgttacccagcgcccctgttggaaccgtggacgaaaagtccattattgagcccatcgtgaacttcgccctgaagaaaaaggggaacgtcacctactatgaggccgaagccaccagcatcaatcccgacaggaataccgtgaccatcaagaacctgtctgccgtgagccagctgtaccagcccgaaaaccatctggggatgcatcaagccgagcccgccgaaattaagtacgattatctgatcagcgctgtgggtgccgagcccaacacctttggtattcccggcgtcaccgactacggtcatttcttcgaggagatccccaacagcctggaaatccggcggacctttgccgccaatctagaagaggccaacctgttgcctaagggcgaccccgagcggagaaggctactgagcattgtcgtcgttggtggtgggcctacaggtgtagaagctgctggcgaactgcaggactacgttcaccaggacctgcggaagttcctgcctgccctggccgaggaagtgcaaattcacttggtggaagccctgcccatcgttctgaacatgttcgagaaaaagctgagcagctacgcgcaaagccacttagaaaacacctccatcaaggtgcacctgagaacggctgtcgccaaggtggaagagaagcaactgttggccaagaccaaacacgaagacggcaagattaccgaggaaaccattccctacggtactctgatttgggccaccggcaacaaggccagaccggtgatcaccgaccttttcaagaaaatccccgagcagaacagcagcaagagaggattggccgtgaacgactttctgcaggtcaaaggcagcaacaacattttcgccatcggtgacaacgcctttgccgggttgcctcctaccgcccaagtggcccaccaagaggccgagtatatcgccaagaacttcgataaaatggcccagatccccaatttccagaagaatctgtcctcacggaaggataaaatcgacctgttgttcgaggagaacaactttaagcccttcaaatacaacgacctgggcgccctggcctacctgggcagcgaaagagccattgcaaccatcagatccggtaagagaacattctacaccggtggaggcctgatgaccttctacctgtggcagatcctgtacctgtccatgatcctgagcgcacgcagcagattaaaggtcttcttcgactggatcaaaatggccttcttcaagagggacttctttaaaggcttatga

SEQ ID NO: 492 - DNA, 1542 bp, Artificial Sequence
  source: /note="Description of Artificial Sequence: Synthetic polynucleotide"
atgctatcgaagaacctgtatagtaacaagcggttgctgaccagcacgaacaccctcgtgcgcttcgccagcaccagatccacaggcgtcgaaaactccggggcaggtcccacaagcttcaagaccatgaaggtcatcgaccctcagcacagcgacaagccaaacgtgctgatactgggttctggctggggagctatctcgtttttaaagcacatcgacaccaagaagtacaacgttagcatcatctctcctagaaagtacttcttacacacgcccctgctgcccagcgcaccagttggaaccgtggacgaaaagtcaatcattgagcccatcgttaacttcgccctgaagaaaaaggggaacgttacctactacgaggccgaggccaccagcatcaaccccgaccggaataccgtgaccataaagaacctgagcgccgtgtcccagctataccagcctgagaaccacctagggctgcatcaagccgagcctgctgagattaagtacgactacttaatcagtgccgtaggcgccgaacctaacacctttggtattcccggcgtgaccgactacggccacttcctggaggagatccccaactctctggaaataagacggacttttgccgccaatctggaaaaggccaacttattgcctaagggcgatcccgaacggagaaggctgctgagcattgtcgtggttggcggagggcctacaggcgtggaagctgctggtgagctacaggattacgtgcaccaggacctgcggaagttcctgcctgcattggccgaggaagtccaaattcacttggtggaagccctgcccatcgttctgaatatgttcgagaaagagctgtcaagctacgcccaatcacacttagaaaacacttccatcaaagtacatctgagaaccgctgtggccaaggttgaagagaagcagttgctggcaaagaccaaacacgaggacggcaaaattaccgaggaaaccattccctacggcaccttgatttgggccaccggcaacaaggccagacccgtgatcactgacctgttcaagaagatccccgagcaaaacagctccaagcggggattggcagtgaatgacttcctgcaggtggagggcagcaacaacatcttcgccattggcgacaacgcctttagcggcttgcctcctaccgcccaggtagcccaccaagaggccgagtacatcgccaagaacttcgacaagatggcccaaatccccaatttccaaaagaacctgtcctcacggaaggataaaatcgatctcctgttcgaggaaaacaacttcaagcctttcaagtacaacgacttaggtgccttagcctacctgggctccgaaagggccattgccaccatccgtagcggtaagcggaccttctacaccggcggaggcctgatgaccttctacctgtggcggatcttgtacatgagcatgatcctgagcgccagaagcagactgaaggtgttcttcgactggattaagctggccttcttcaaaagggacttttttgagggcctgtga

SEQ ID NO: 493 - DNA, 1542 bp, Artificial Sequence
  source: /note="Description of Artificial Sequence: Synthetic polynucleotide"
atgctaagcaagaacctgtacagcaaccggcggttgctcacctcgaccaataccctagtgcgcttcgcttccaccagatccacaggcgtggaaaacagcggggctggccccaccagcttcaagaccatgaaggtcatcgaccctcagcacagcgacaagccaaacgtgctgatactgggctctgggtggggagccatcagctttctgaagcacatcgacaccaagaagtacaacgttagcatcatcagccccagaaagtacttcttacacacgcctctgatgcccagcgcacctgttggaacagtggacgaaaagtccattatcgagcccatcgttaactttgccctcaagaaaaaggggaacgtcacctactacgaggccgaggccaccagcatcaaccccgaccggaacaccgttaccatcaaaaacctgtctgccgtgtcccagctataccaacctgaaaaccacctggggctgcatcaagccgagcctgccgagattaagtacgactacttaatcagcgctgtaggcgcggagcctaacacatttggaatccctggggtcaccgattacggtcacttcctggaggagatccccaacagcctggaaatacggcggactttcgccgccaacctagaagaggccaacctgctgcctaagggtgaccccgaaagaagaaggctactgagcatcgtcgtggttggcggtggccccacaggtgtggaggccgctggtgagctgcaggattacgttcaccaggacctgcggaagttcctccccgccttggccgaagaagtgcagattcacctggtggaagccctgcccatcgttctgaacatgtttgagaaagagctgagctcatacgcccagagccatctggaaaacacctccatcaaggtgcatctgagaaccgccgtggccaaagtggaagagaagcagctgttggcaaagaccaaacacgaagacggcaagattaccgaggaaactattccctacggcaccctgatttgggccaccggcaacaaggccagaccggtaatcactgacctgttcaagaaaatccccgagcaaaacagcagcaagcggggcctggcagtgaacgacttcctgcaggtcaaaggcagcaacaacatcttcgccattggcgacaatgcatttagcggcctgcctccaacagcccaggtggcgcaccaggaagccgagtacttggccaagaatttcgacaagatggcccagatcccaaatttccaaaagaatctgtcttcccggaaggataagatcgatctgttgttcgaggagaacaactttaagcccttcaagtacaacgacctgggcgccctggcctacctgggaagcgaaagggccattgcaaccatacgttccggcaagcggaccttctacaccggtggtggcttaatgaccttctacttatggagaatcctgtacatgagcatgatcctgtctgccagatcgagactgaaggtgtttttcgactggattaaactggcattcttcaagagagactttttcaagggactgtga

SEQ ID NO: 494 - DNA, 1542 bp, Artificial Sequence
  source: /note="Description of Artificial Sequence: Synthetic polynucleotide"
atgctgtcgaagaacctgtatagcaacaagcggttgctcacctcgaccaacaccatggtgcgcttcgctagcaccagatccaccggcgtcgaaaactccggggctggccctaccagcttcaagaccatgaaagtcatcgaccctcagcacagcgacaagccaaacgtgctgatactgggctcggggtggggcgccatcagctttttaaagcacatcgacaccaagaagtacaacgtctccatcatcagccctagaaagtacttcttacacacgcctctgatgcccagcgcccctgttggaaccgtggacgagaagtccattattgagcccatcgtgaactttgccctcaagaaaaagggcaacgtcacctactacgaggcagaggccacctctatcaatcccgaccggaataccgttaccatcaaaaacttatctgccgtgagccagctgtaccagcctgagaaccacctagggctgcaccaagccgagcccgccgagattaagtacgattacctgatcagcgctgtaggcgcggagcccaacacctttggaattcccggggtcactgattacggccacttcctggaggaaatccccaacagcctggaaatacggagaacttttgccgccaatctggaaaaggctaacttattgcctaagggcgaccccgagagaagaaggctgctgtccatcgtcgtggttggcggtggccctactggcgtagaggctgctggcgaactacaggactacgtgcaccaggacctgcggaagttcttccccgccttggccgaggaagtccagattcacctggtcgaagctctgcccatcgttctgaacatgttcgagaaggagcttagcagctacgcccaaagccacctggaaaacacctcgatcaaggtgcatctgagaacggccgtcgccaaggttgaagagaagcagctgttggccaagaccaagcacgaggacggcaaaattaccgaggaaactattccctacggcactttgatttgggccaccggcaacaaggcaagacccgtgatcactgacctgttcaagaaaatccccgagcagaactcgagcaagcggggcttggccgtgaacgacttcctgcaggtcaaaggcagcaacaacattttcgccattggcgacaatgcctttgctgggttgccacctaccgcccaagtggcccaccaagaagccgagtacctggccaagaatttcgataaaatggctcagatccccaatttccagaagaacctgtcctcccggaaggataaaatcgacctcttgttcgaggagaacaactttaagcccttcaagtacaacgacttaggcgccttagcctacctgggctccgaaagagccattgccaccatcagaagcggcaagagaaccttctacaccggtggaggcttaatgaccttctacttatggcagatcctgtacctgagcatgatcctgagcgccagatcgagattaaaggtgttcttcgactggattaaactggcctttttcaaaagagacttcttcgagggactgtga

SEQ ID NO: 495 - DNA, 1542 bp, Artificial Sequence
  source: /note="Description of Artificial Sequence: Synthetic polynucleotide"
atgctgagcaagaacttgtatagcaaccggcggctgctgacctcgacgaacaccctcgtgcgcttcgcttccaccagatccacaggggtggaaaacagcggggctggccctacaagctttaagaccatgaaagtcattgaccctcagcacagcgacaaacccaacgtgctgatcctgggctctgggtggggagctatctcgtttttaaagcacatcgacaccaagaagtacaacgtctccatcatctctcccagaaagtacttcctgtttacgcccctgctgccctctgccccagttggaacagtggacgaaaagtccattattgagcccatcgtgaattttgccctgaagaaaaagggcaacgttacctactacgaggccgaagccacctctatcaatcccgaccggaataccgttaccatcaaaagcctgtctgccgtgtcccagctgtaccaacctgagaaccacctggggatgcaccaagccgaacctgccgagattaagtacgactatctgatcagtgctgtgggcgcggagcccaacacctttggaattcccggcgtcaccgactacggccacttcttcgaggaaatccccaacagcttggaaatacggcggacttttgccgccaacctggaagaggccaacttattgccaaagggcgaccccgaaagaagaaggctgctgtccatcgtggtggtgggcggtggccccactggcgtagaagctgctggcgaactgcaggactacgttcaccaggacctgcggaagtttctccccgccctggccgaagaagtgcaaattcacctggtcgaagctctgcccatcgtgttgaacatgtttgagaagaagctttcatcatacgcccagagccatttagaaaacacctccatcaaggtgcacctgagaacggccgtggccaaagtggaagagaagcaattgctggccaagaccaagcacgaggacggcaagataaccgaggaaactattccctacggcactctgatttgggccaccggcaacaaggccagaccggtgatcaccgacctgttcaagaaaattcccgagcagaacagctccaagcggggcttggccgtgaatgacttcctgcaggtcaaaggcagcaacaacattttcgccattggcgacaatgcctttagcggcttgccacctaccgcccaggtggcccaccaggaggccgagtatatcgccaagaacttcgacaaaatggctcagatccccaatttccagaagaacctgtcctcccggaaggataagattgacctcctgttcgaggagaacaactttaagcccttcaaatacaacgacttaggcgccctggcctacctgggctccgaaagagccattgccaccatccgtagcggcaagcggacattctacaccggcggaggcttaatgaccttctacttatggcagatcctgtacctgagcatgattctgtctgcacgcagcagattaaaggtgttcttcgactggatcaagttagcatttttcaagagggacttcttcgagggcttatga

SEQ ID NO: 496 - DNA, 1542 bp, Artificial Sequence
  source: /note="Description of Artificial Sequence: Synthetic polynucleotide"
atgctgtcgaagaacctgtatagtaacaagcggctgctgaccagcaccaacaccatggtcagattcgctagcaccagatccaccggcgtggaaaactccggggcaggccccacctcttttaagaccatgaaggtcattgaccctcagcacagcgacaaacccaacgtgctgatcctgggctctgggtggggcgccatctcgtttctgaagcacatcgacaccaagaagtacaacgtctccatcatcagccccagaagctacttcctgcacacgcccttgctgcccagcgcccctgttgggaccgtggacgaaaagtcaatcatcgagcccatcgttaattttgctctcaagaaaaagggcaacgtcacctactatgaggccgaggccacctctatcaaccccgaccggaacaccgttaccataaaaaacctgtctgccgtgagccagctgtaccaacccgaaaaccacctgggcctgcaccaagccgagcctgccgagattaagtacgactatttaatcagcgccgtgggtgccgaacctaacacatttggaatccccggcgtgaccgactacggtcacttcttcgaggaaatccccaactctctggaaatacggcggaccttcgccgccaacctggaagaggccaacttactgccaaagggcgatcccgagcggagaaggctgctgtccatcgtggtggttggcggtgggcctacaggcgtagaggctgctggcgaactgcaggattacgtgcaccaggacctgcggaagttcttccctgcactggccgaagaagtgcagattcacctggtggaagctctgcccatcgtgctgaatatgttcgagaaagagctgagcagctacgcccagtcacatttagaaaacacttccatcaaggtacacctgagaaccgccgtggccaaggttgaagagaagcaattgctggccaagaccaagcacgaagacggcaagataaccgaagaaaccattccctacggcactctgatttgggccacgggcaacaaggcaagaccggtaatcaccgacctgttcaagaaaattcccgagcaaaactcgagcaagcggggactggccgtgaatgactttctgcaggtcaaaggcagcaacaacatcttcgccattggcgacaatgcctttagcggcttgcctcctacagcccaggtggcccaccaagaggccgaatacctggccaagaacttcgataagatggcccagatcccaaatttccaaaagaacctgtcctcccggaaggataaaatcgatctcttgttcgaggaaaacaacttcaagcctttcaaatacaacgatctgggcgccctggcctacctgggctccgaaagagccattgccaccatcagatccggtaagcggaccttctacaccggcggaggcctgatgaccttctacttatggcggattctgtacatgagcatgatcctaagcgcaagaagcagattaaaggtcttcttcgactggatcaaactggcattcttcaaaagagactttttcaagggattatga

SEQ ID NO: 497 - DNA, 1542 bp, Artificial Sequence
  source: /note="Description of Artificial Sequence: Synthetic polynucleotide"
atgctgagcaagaacctgtacagtaaccggcggctgctcaccagcaccaacaccatggtcagattcgcctccaccagatccaccggggtggaaaacagcggggcaggccccacaagctttaagaccatgaaggtcattgaccctcagcacagcgacaaaccaaacgtgctgatcctgggttctggctggggcgctatcagctttttaaagcacatcgacaccaagaagtacaacgttagcatcatcagccctagaaagtacttcctgcacacccctctgctgcccagcgcccctgtggggaccgtggacgagaagtccattatcgagcccatcgtgaatttcgctctgaagaaaaagggcaacgttacctactacgaggcagaggccaccagcatcaaccccgaccggaacaccgttaccataaagagcctgtctgccgtttcccagctgtaccaacccgagaaccatctgggcctgcaccaggcagagcccgccgagattaagtacgattatctgatcagcgctgtgggcgcggaacccaacacctttggaatccccggcgtgaccgattacggccacttcctgaaagagattcccaactctttggaaatcagaagaacttttgccgccaacctggaaaaggccaacctgctgccaaagggtgaccccgagcggagaagactactgtccatcgtggtcgttggtggtggccctacaggcgtggaagccgctggtgagctgcaggattatgtgcaccaggacctgagaaagttcttccccgccttggccgaagaagtgcagattcacctggtcgaagccctgcccatcgtgttgaatatgtttgagaagaagctgagctcatacgcgcagagccatttagaaaacacttcgatcaaggtacacctgagaaccgccgtcgccaaggtggaagagaagcaactgctggccaagaccaagcacgaggacggcaagattaccgaagaaaccattccatacggtaccttgatttgggccacgggcaacaaggcaagacccgtgatcactgacctgttcaagaagatccctgagcaaaactcgtccaagcggggcttggcagtgaacgacttcttgcaggtcgagggcagcaacaacatcttcgccatcggcgacaatgcctttgccggcttgccacctacagcccaggtggcccaccaggaagccgaatacatcgccaagaacttcgataaaatggctcagatacccaatttccaaaagaatctgtcttcaagaaaggataaaatcgatctcctgttcgaggaaaacaacttcaaacctttcaaatacaacgacctgggcgccctggcatacctgggctccgaaagggccattgcaaccatcagaagcggcaagagaacattttacaccggtggtggcctgatgaccttctacttatggcggattttgtacatgagcatgattctatctgcccgcagcagactgaaggtgttcttcgactggatcaagatggcattcttcaaaagagacttcttcaagggcctgtga

SEQ ID NO: 498 - DNA, 1542 bp, Artificial Sequence
  source: /note="Description of Artificial Sequence: Synthetic polynucleotide"
atgctgagcaagaacctgtacagtaacaagcggctgctcacctcgacgaacacgatggtgcgcttcgctagcaccagatccaccggcgtcgaaaacagcggagcaggccccacaagcttcaagaccatgaaggtcatcgacccccagcacagcgacaagcccaacgtgctgatcctgggctcgggctggggcgctatcagctttttaaagcacattgacaccaagaagtacaacgtcagcatcatctctcccagaaagtacttcctgttcacgcctctgatgcccagcgcccctgttggaaccgtagacgagaagtccatcatcgagcccatcgttaacttcgctctcaagaaaaaggggaacgtcacctactacgaggccgaagccacctctatcaaccccgacaggaataccgttaccataaagagcttaagcgccgtgagccagctataccagcctgaaaaccacctagggatgcatcaggccgagcctgccgagattaagtacgactacctgatcagcgctgtgggtgccgagcccaacacatttggaattcctggggtgaccgattacggccacttcttcgaggagattcccaacagcctggaaatccggagaacctttgccgccaacctggagaaggccaacctgttgcctaagggcgatcccgaacggagaagactactgtccatcgtggtcgttggtggaggccctacaggtgtagaagctgctggcgagctgcaggattatgtgcaccaggacctgagaaagttcctgcctgccctggccgaggaagtgcagattcacctggtcgaagctctgcccatcgtgctgaatatgttcgagaaaaagcttagctcatacgcccaaagccacctggaaaacacctccatcaaggtgcacctgagaacggctgtggccaaagttgaagaaaagcaattgctggcaaagaccaagcacgaagacggtaagattaccgaagaaactattccctacggcaccctgatttgggccacgggtaacaaggcaagacccgtaatcaccgacctgttcaagaagatccccgagcaaaacagcagcaagagaggattggcagtgaacgacttcctgcaggtcgagggcagcaacaacattttcgccatcggtgacaacgcatttgctggcttgccacctacagcccaagtggcccaccaggaggccgagtacatcgccaagaactttgacaagatggcccagatcccaaatttccaaaagaatctatcctcccggaaggataagatcgacctcctgttcgaggagaacaacttcaagcccttcaagtacaacgatctgggcgccttagcatacctgggcagcgaaagagccattgccaccataagaagcggcaagcggaccttctacaccggcggaggcctgatgaccttctacttatggcagattttgtacttgagcatgatcctaagcgcacgctcgagactgaaggtgtttttcgactggatcaaaatggcatttttcaagagggacttctttaaaggattatga

SEQ ID NO: 499 - DNA, 1542 bp, Artificial Sequence
  source: /note="Description of Artificial Sequence: Synthetic polynucleotide"
atgctgtcgaagaatctgtatagcaacaagcggttgctgaccagcaccaacaccctagtgagattcgcttccaccagatccaccggcgtggaaaacagcggggcaggccccacaagcttcaagaccatgaaagtcatcgacccccagcacagcgacaaacccaacgtgctgatactgggctctggctggggcgccatctcgtttttaaagcacattgacaccaagaagtacaacgtttccatcatcagccccagaaagtacttcttacacacccccctgatgcccagcgcacctgttggaaccgtagacgagaagtccatcatcgagcccatcgtgaactttgccctgaagaaaaaggggaacgtcacctactacgaggccgaggccaccagcatcaatcccgacaggaacaccgttaccatcaagaacttaagcgccgtttcccagctgtaccagcctgagaaccacctaggcatgcatcaggcagagcccgccgagattaagtacgactacctgatcagtgccgtaggcgccgagcccaacacctttggaatccccggggtgaccgactacggccacttcctggaggagattcccaacagcctggaaatcagacggaccttcgccgccaatctggaagaggctaacctgctgccaaagggtgaccccgagcggagaaggctactgtccatcgtggtcgtgggtggagggcctactggcgtagaagctgctggcgagctacaggattatgtgcaccaggacctgagaaagttcctgcctgccttggccgaggaagtgcaaattcacctggtcgaagctctgcccatcgttttgaacatgttcgagaagaagctgagctcatacgcccaatcacatctggaaaacacctccatcaaagtgcatctgagaaccgctgtcgccaaagtggaagaaaagcaactgctggccaagaccaagcacgaagacggcaaaataaccgaggaaaccattccatacggcactctgatttgggccaccggtaacaaggccagaccggtaatcaccgaccttttcaagaaaatccctgagcagaactcgagcaagagaggcttggcagtgaatgacttcctgcaggtggagggcagcaacaacatcttcgccattggtgacaatgcctttagcggcctgccacctacagcccaggtggcccaccaagaagccgagtacctggccaagaatttcgacaagatggctcaaatacccaatttccagaagaacctatcttcacggaaggataagatcgatctgctgttcgaggaaaacaactttaaacccttcaagtacaacgacctgggtgccctggcatacctgggcagcgaaagagccattgcaaccataagatccggcaagagaaccttttacaccggtggaggcttaatgaccttctacttatggagaattttgtacttgagcatgatcctgagcgccagatcgagactgaaggtctttttcgactggatcaagatggccttcttcaagagagactttttcaagggactgtga

SEQ ID NO: 500 - DNA, 1542 bp, Artificial Sequence
  source: /note="Description of Artificial Sequence: Synthetic polynucleotide"
atgctgagcaagaacttgtacagcaacaagcggttgctgaccagcacgaacaccatggtcagattcgcctccaccagatccaccggcgtggaaaacagcggagctggccccacatctttcaagaccatgaaagtcatcgaccctcagcacagcgacaagcccaacgtgctgatactgggctcggggtggggagccattagctttttaaagcacatcgacaccaagaagtacaacgtctccatcatcagccctagaagctacttcctgtttacccccctgttaccctctgcaccagttggaaccgtggacgagaagtcaatcattgagcccatcgtgaacttcgccctgaagaaaaaggggaacgtcacctactacgaggcagaggccaccagcatcaaccccgacaggaacaccgttaccataaagagcctgtctgccgttagccagctgtaccagcccgagaaccatctaggcatgcatcaagcagaacctgctgagattaagtacgactatctgatcagcgccgtgggcgccgaacccaacacatttggaattcctggggtgaccgattacggccacttcttcgaggagattcccaactctctggaaatccggagaacctttgccgccaatctggaaaaggctaacctgttgccaaagggcgaccccgaacggagaaggctgctgtccatcgtcgtcgtgggtggtgggcccactggcgtggaggctgctggtgagctgcaggactacgttcaccaggacctgcggaagtttctccccgcattggccgaggaagtgcagattcacctggtggaagccctgcccatcgttctgaacatgtttgagaagaagctgtcaagctacgcgcaatcacatctggaaaacacttcgatcaaggtgcatctgagaaccgccgtcgccaaggtggaagagaagcaactgctggccaagaccaagcacgaggacggtaagattaccgaggaaaccatcccctacggtaccttgatttgggccaccggtaacaaggcaagacccgtgatcaccgaccttttcaagaaaatccccgagcaaaactcgtccaagcggggcctggccgtgaacgacttcctgcaggtcgagggcagcaacaacatcttcgccatcggcgacaatgcatttagcggcctgcctccaacagcccaagtggcgcaccaggaggccgagtacatcgccaagaacttcgacaagatggcccagatacccaatttccagaagaacctatcttcccggaaggataaaattgacctgctgttcgaggagaacaacttcaagcccttcaagtacaacgacttaggtgccctggcctacctgggatccgaaagggccattgccaccatccgtagcggtaagcggaccttctacaccggcggaggcctgatgaccttctacctgtggcagattctgtacctgagcatgattctgtctgccagatcgagactgaaggtgtttttcgactggattaagatggcatttttcaagagagacttttttgagggcttatag

SEQ ID NO: 501 - DNA, 1542 bp, Artificial Sequence
  source: /note="Description of Artificial Sequence: Synthetic polynucleotide"
atgctgagcaagaatctgtatagtaacaagaggttgctgaccagcaccaacaccatggtgcgcttcgccagcaccagatccacaggcgtggaaaacagcggagcaggtcctaccagctttaagaccatgaaggtcattgacccccagcacagcgacaagccaaacgtgctgatcctgggttcgggctggggagctatctcgtttctgaagcacattgacaccaagaagtacaacgttagcatcatcagccctagaaagtatttcctgcacacccccctgatgccttctgcccctgtgggaacagtggacgaaaagtcaatcatcgagcccatcgtgaactttgccctgaagaaaaagggcaacgttacctactatgaggcagaggccacctctatcaatcccgacaggaacaccgttaccatcaagaacctgagcgccgtgtcccagctgtaccaacctgagaaccatctagggctgcaccaagccgagcccgctgagattaagtacgattacttaatcagcgccgtaggtgcggagcctaacacctttggaatccccggcgtgaccgactacggccatttcctgaaggagatccccaactctttggaaatacggcggaccttcgccgccaatctagaggaggccaacctgttgcctaagggtgaccccgaacggagaagactgctgagcatcgtggtggtgggcggaggccccactggtgtggaagctgctggcgagctacaggattatgtgcaccaggacctgcggaagttcctgcccgccttggccgaggaagtccaaattcacttggtggaagccctgcccatcgttctgaatatgttcgagaaagagctgagcagctacgcccaatcacacttagaaaacacctccatcaaggtgcatctgagaaccgccgtcgccaaggtggaagagaagcaactgttggccaagaccaagcacgaagacggcaaaataaccgaagaaaccattccctacggcaccctgatttgggccaccggcaacaaggccagacccgtaatcactgaccttttcaagaagatccctgagcagaactcgagcaagagaggactggccgtgaatgacttcctgcaggtggagggcagcaacaacatcttcgccattggcgacaatgcatttgccggcttgcctcctacagcccaagtggcgcaccaggaagccgagtacatcgccaagaacttcgacaagatggcccagatacccaatttccagaagaatctatcctccagaaaggataaaattgacctgttgttcgaggaaaacaacttcaagcccttcaagtacaacgacctgggtgccctggcatacctgggatccgaaagggccattgcaaccatcagatccggtaagagaaccttttacaccggcggtggcctgatgaccttctacttatggcagattctgtacctgagcatgattctgagcgcccgcagcagactgaaggtcttcttcgactggatcaagctggcattcttcaaaagggacttctttaagggattatga

SEQ ID NO: 502 - DNA, 1542 bp, Artificial Sequence
  source: /note="Description of Artificial Sequence: Synthetic polynucleotide"
atgctaagcaagaacctgtacagcaacaagcggctgctgaccagcaccaacaccatggtgcgcttcgctagcaccagatccaccggcgtggaaaacagcggggcaggccccacctctttcaagaccatgaaggtcatcgaccctcagcacagcgacaagcccaacgtgctgatcctgggctctggctggggcgccatctcgtttctgaagcacatcgacaccaagaagtacaacgttagcatcatcagccccagaagctacttcctgcacacccccctgatgcccagcgcccctgttggaaccgtggacgagaagtccatcatcgagcccatcgtgaactttgccctgaagaaaaagggcaacgtcacctactacgaggccgaggccaccagcatcaaccccgaccggaacaccgtgaccatcaagaacctgagcgccgtgtcccagctgtaccagcccgagaaccacctgggcctgcaccaggccgagcccgccgagattaagtacgattacttaatcagcgccgtgggcgccgagcccaacacctttggaatccctggcgtgaccgactacggtcacttcttcgaggagatccccaacagcctggaaatccggcggaccttcgccgccaatctggaagaggccaacctgctgcctaagggcgaccccgagcggagaaggctgctgagcatcgtggtcgtgggtggaggccccacaggcgtggaagccgctggcgagctgcaggactacgttcaccaggacctgcggaagttcctgcccgccctggccgaggaagtgcagattcacctggtggaagccctgcccatcgtgctgaacatgttcgagaaggagctgtcaagctacgcccagagccacctggaaaacacctccatcaaggtgcacctgagaaccgctgtggccaaagtggaagagaagcagctgctggccaagaccaagcacgaggacggcaagattaccgaggaaactatcccctacggcaccctgatttgggccaccggcaacaaggccagacccgtgatcaccgacctgttcaagaagatccccgagcagaacagcagcaagcggggcctggccgtgaacgacttcctgcaggtcaaaggcagcaacaacatcttcgccattggcgacaacgcctttagcggcctgcctcctacagcccaggtggcccaccaagaggccgagtacatcgccaagaacttcgataagatggcccagatccccaatttccagaagaacctgtcctcccggaaggataagatcgacctgttgttcgaggaaaacaacttcaagcccttcaagtacaacgacctgggcgccctggcctacctgggcagcgaaagagccattgccaccatcagaagcggtaagcggaccttctacaccggcggaggcctgatgaccttctacctgtggcggattctgtacctgagcatgatcctgagcgcccgcagcagactgaaggtgttcttcgactggatcaagctggccttcttcaagagggacttcttcaagggcctgtga

SEQ ID NO: 503 - DNA, 1542 bp, Artificial Sequence
  source: /note="Description of Artificial Sequence: Synthetic polynucleotide"
atgctgagcaagaacctgtacagcaacaagaggctgctgaccagcaccaacaccctcgtgcgcttcgccagcaccagatccaccggcgtcgaaaacagcggggctggccccacaagcttcaagaccatgaaggtcatcgacccccagcacagcgacaagcccaacgtgctgatcctgggttctggctggggcgccatcagctttctgaagcacatcgacaccaagaagtacaacgtcagcatcatcagccccagaaagtacttcctgcacacccccctgctgcccagcgcccctgtgggaaccgtggacgagaagtccatcatcgagcccatcgtgaacttcgccctgaagaaaaagggcaacgtcacctactacgaggccgaggccaccagcatcaaccccgaccggaataccgtgaccatcaagaacctgagcgccgtgtcccagctgtaccaacctgagaaccacctgggcatgcaccaggccgagcccgccgagattaagtacgactacctgatcagcgccgtgggcgccgagcccaacacctttggaatccccggcgtgactgactacggccacttcttcaaagagatccccaacagcctggaaatccggcggaccttcgccgccaatctggaagaggccaacctgctgcctaagggcgaccccgaacggagaaggctgctgagcatcgtggtcgtgggcggaggccccacaggcgtggaagctgctggcgagctgcaggattacgtgcaccaggacctgcggaagttcctgcccgccctggccgaggaagtgcagattcacctggtggaagccctgcccatcgtgttgaacatgttcgagaagaagctgagcagctacgcccagagccatctggaaaacacctccatcaaggtgcacctgagaaccgccgtggccaaggtggaagagaagcagctgctggccaagaccaagcacgaggacggcaagattaccgaggaaaccatcccatacggcaccctgatttgggccacgggcaacaaggccagacccgtgatcactgacctgttcaagaagatccccgagcagaacagcagcaagagaggcctggcagtgaacgacttcctgcaggtcaaaggcagcaacaacatcttcgccatcggcgacaacgcctttgctggcctgcctcctacagcccaggtggcccaccaggaagccgagtatatcgccaagaacttcgacaagatggcccagatccccaatttccagaagaacctgtcctcccggaaggataagatcgacctcctgttcgaggaaaacaacttcaagcccttcaagtacaacgatctgggcgccttagcctacctgggctccgaaagagccattgcaaccatcagaagcggcaagcggacattctacaccggcggaggcctgatgaccttctacctgtggcagatcctgtacctgagcatgatcctgagcgcacgcagcagactgaaggtgttcttcgactggatcaagatggccttcttcaaaagggacttcttcaagggcctgtga

SEQ ID NO: 504 - DNA, 1542 bp, Artificial Sequence
  source: /note="Description of Artificial Sequence: Synthetic polynucleotide"
atgctgagcaagaacctgtacagcaaccggcggctgctgaccagcaccaacaccctcgtgcgcttcgccagcaccagatccaccggcgtcgaaaactccggggctggtcccaccagcttcaagaccatgaaggtcatcgacccccagcacagcgacaagcccaacgtgctgatcctgggctctggctggggcgccatcagctttctgaagcacatcgacaccaagaagtacaacgtcagcatcatcagccccagaaagtatttcttacacacccctctgatgccctctgcccctgtgggaaccgtggacgagaagtccatcatcgagcccatcgtgaacttcgccctgaagaaaaagggcaacgtcacctactacgaggccgaggccacctctatcaaccccgaccggaacaccgtgaccatcaagaacctgagcgccgtgtcccagctgtaccagcccgagaaccacctaggcctgcaccaggccgagcccgccgagattaagtacgactacctgatcagcgccgtgggcgcggagcccaacacctttggaatccctggggtgaccgactacggccacttcttcaaagagatccccaacagcctggaaatccggcggaccttcgccgccaatctggaagaggccaacctgctgcctaagggcgaccccgaacggagaaggctgctgagcatcgtggtcgtgggcggaggccccacaggcgtggaagctgctggcgagctgcaggactacgtgcaccaggacctgcggaagttcctgcccgccctggccgaagaagtgcagattcacctggtggaagccctgcccatcgtgctgaacatgttcgagaagaagctgagcagctacgcccaaagccacctggaaaacacctccatcaaggtgcacctgagaaccgccgtggccaaggtggaagagaagcagctgctggccaagaccaagcacgaggacggcaagattaccgaggaaactattccctacggcaccctgatttgggccaccggcaacaaggccagacccgtgatcaccgacctgttcaagaagattcccgagcagaactcgagcaagcggggcctggccgtgaacgacttcctgcaggtcgagggcagcaacaacatcttcgccattggcgacaatgcctttagcggcctgcctcctacagcccaggtggcccaccaggaagccgagtacctggccaagaacttcgacaagatggcccagatccccaatttccagaagaatctgtcctcacggaaggataagattgacctgctgttcgaggaaaacaacttcaagcctttcaagtacaacgacctgggcgccctggcctacctgggcagcgaaagagccattgccaccatccgtagcggcaagcggacattctacaccggcggaggcctgatgaccttctacctgtggcggatcctgtacatgagcatgatcctgagcgcccgcagcagactgaaggtgttcttcgactggatcaagctggccttcttcaagagggactttttcaaaggcctgtga

SEQ ID NO: 505 - DNA, 1542 bp, Artificial Sequence
  source: /note="Description of Artificial Sequence: Synthetic polynucleotide"
atgctgagcaagaacctgtacagcaaccggcggctgctgaccagcaccaataccctcgtgcgcttcgcctccaccagatccaccggcgtggaaaacagcggggctggccccaccagcttcaagaccatgaaggtcatcgacccccagcacagcgacaaacccaacgtgctgatcctgggctctggctggggcgccatcagctttctgaagcacatcgacaccaagaagtacaacgtcagcatcatcagccccagaaagtacttcttattcacccccctgatgcccagcgcccctgttggaaccgtggacgaaaagtccatcatcgagcccatcgtgaacttcgccctgaagaaaaagggcaacgtcacctactacgaggccgaggccaccagcatcaaccccgaccggaacaccgtgaccatcaagagcctgagcgccgtgtcccagctgtaccagcccgagaaccacctgggcctgcaccaggccgagcccgccgagattaagtacgactatttaatcagcgccgtgggcgccgagcccaacacctttggaatccccggggtgaccgactacggccacttcctgaaagagatccccaacagcctggaaatccggcggaccttcgccgccaacctggaaaaggccaacctgctgcctaagggcgaccccgagcggagaaggctgctgagcatcgtggtcgttggcggaggccccacaggcgtagaagctgctggcgagctgcaggactatgtgcaccaggacctgcggaagttcttccccgccctggccgaggaagtgcagattcacctggtggaagccctgcccatcgtgctgaatatgttcgagaaggagctgagcagctacgcccagagccatctggaaaacacctccatcaaggtgcacctgagaaccgccgtggccaaggtggaagagaagcagctgctggccaagaccaagcacgaggacggcaagattaccgaagaaaccatcccctacggcaccctgatttgggccaccggcaacaaggccagacccgtgatcaccgacctgttcaagaagatccccgagcagaactcgagcaagcggggcctggccgtgaatgacttcctgcaggtcaaaggcagcaacaacatcttcgccatcggcgacaacgcatttagcggcctgcctccaacagcccaggtggcccaccaggaagccgagtacatcgccaagaacttcgacaagatggcccagatccccaatttccaaaagaacctatcctccagaaaggataaaatcgacctgctgttcgaggaaaacaacttcaagcccttcaagtacaacgacctgggtgccctggcctacctgggctccgaaagagccattgccaccatcagaagcggcaagagaaccttctacaccggcggaggcctgatgaccttctacctgtggagaatcctgtacatgagcatgatcctgagcgcccgcagcagactgaaggtgttcttcgactggatcaagatggccttcttcaagagagacttcttcgagggcctgtga

SEQ ID NO: 506 - DNA, 1542 bp, Artificial Sequence
  source: /note="Description of Artificial Sequence: Synthetic polynucleotide"
atgctgagcaagaacctgtacagcaacaagcggctgctgaccagcaccaacacgctcgtccgcttcgccagcaccagatccaccggcgtcgaaaacagcggggctggtcccaccagcttcaagaccatgaaagtcatcgacccccagcacagcgacaagcccaacgtgctgatcctgggctctggctggggcgccatcagctttctgaagcacatcgacaccaagaagtacaacgtcagcatcatcagccctagaagctacttcctgcacacccccctgatgcccagcgcccctgtgggaaccgtggacgagaagtccattatcgagcccatcgtgaatttcgccctgaagaaaaaggggaacgtcacctactacgaggccgaggccaccagcatcaaccccgaccggaacaccgtgaccatcaaaaacctgagcgccgtgtcccagctgtaccagcccgagaaccacctgggcatgcaccaggccgagcccgccgagattaagtacgactacctgatcagcgccgtgggcgccgagcccaacacctttggaatccccggcgtgaccgactacggccacttcctgaaagagatccccaacagcctggaaatccggcggactttcgccgccaacctggaaaaggccaacctgctgcctaagggtgaccccgagagaagaaggctgctgtccatcgtggtcgtgggcggagggcccacaggcgtggaagctgctggtgagctacaggactacgtgcaccaggacctgcggaagttcttccccgcactggccgaggaagtgcagattcacctggtggaagccctgcccatcgttctgaacatgttcgagaaggagctgagcagctacgcccagagccacctggaaaacacctccatcaaggtgcacctgagaaccgccgtggccaaggtggaagagaagcagctgctggccaagaccaagcacgaggacggcaagattaccgaggaaaccatcccctacggcaccctgatttgggccaccggcaacaaggccagacccgtgatcactgacctgttcaagaagatccccgagcagaacagcagcaagcggggcctggccgtgaatgacttcctgcaggtcgagggcagcaacaacatcttcgccatcggcgacaacgcatttgccggcctgcctcctacagcccaggtggcccaccaggaagccgagtatttggccaagaacttcgacaagatggcccagatccccaatttccagaagaacctgtcctcccggaaggataagatcgacctcctgttcgaggaaaacaacttcaagcccttcaagtacaacgacctgggcgccctggcctacctgggcagcgaaagagccattgccaccatcagaagcggcaagcggaccttctacaccggcggaggcctgatgaccttctacctgtggcggatcctgtacatgagcatgatcctaagcgcccgcagcagactgaaggtgtttttcgactggattaagatggccttcttcaaaagggacttcttcgagggcctgtga

SEQ ID NO: 507 - DNA, 1542 bp, Artificial Sequence
  source: /note="Description of Artificial Sequence: Synthetic polynucleotide"
atgctaagcaagaacctgtacagcaacaagcggctgctgaccagcaccaacaccctcgtgcgcttcgccagcaccagatccaccggggtcgaaaacagcggggctggccccaccagcttcaagaccatgaaggtcatcgacccccagcacagcgacaagcccaacgtgctgatcctgggctctggctggggcgctatctcgtttctgaagcacatcgacaccaagaagtacaacgttagcatcatcagccccagaaagtacttcctgcacacccccctgatgcccagcgcacctgtgggaacagtggacgagaagtccatcatcgagcccatcgtgaacttcgccctgaagaaaaagggcaacgtcacctactacgaggccgaagccaccagcatcaaccccgaccggaacaccgtgaccatcaagagcctgagcgccgtgtcccagctgtaccagcccgagaaccacctgggcctgcaccaggccgagcccgccgagattaagtacgactacctgatcagcgccgtgggcgccgagcccaacacctttggaatccccggcgtcaccgactacggccacttcttcgaggagatccccaacagcctggaaatccggagaaccttcgccgccaacctggaaaaggctaacctgctgccaaagggcgatcccgagcggagaaggctgctgagcatcgtggtcgtgggcggaggccccacaggtgtagaagccgctggcgagctgcaggactacgtgcaccaggacctgcggaagttcctgcccgccctggccgaggaagtgcaaattcacctggtggaagccctgcccatcgtgctgaacatgttcgagaaagagctgagcagctacgcccagagccacctggaaaacacctccatcaaggtgcacctgagaaccgctgtggccaaggtggaagagaagcagctgctggccaagaccaagcacgaggacggcaagattaccgaggaaaccatcccctacggcaccctgatttgggccacgggcaacaaggccagaccggtgatcaccgacctgttcaagaagatccccgagcagaacagcagcaagcggggactggccgtgaacgacttcctgcaggtcaaaggcagcaacaacatcttcgccatcggcgacaacgcctttgccggcctgcctcctacagcccaggtggcccaccaggaagccgagtacctggccaagaacttcgataagatggcccagatacccaatttccagaagaacctgtcctcccggaaggataagatcgacctcctgttcgaggagaacaacttcaagcccttcaagtacaacgacctgggcgccctggcctacctgggcagcgaaagagccattgcaaccatcagaagcggcaagcggaccttctacaccggcggaggcctgatgaccttctacctgtggcagatcctgtacatgagcatgatcctgagcgcccgcagcagactgaaggtgtttttcgactggatcaagatggccttcttcaagagggacttctttgagggcctgtga

SEQ ID NO: 508 - DNA, 1542 bp, Artificial Sequence
  source: /note="Description of Artificial Sequence: Synthetic polynucleotide"
atgctgagcaagaacctgtacagcaaccggcggctgctgaccagcaccaacaccctcgtgcgcttcgccagcaccagatccaccggcgtcgaaaacagcggggctggccccaccagcttcaagaccatgaaggtcatcgacccccagcacagcgacaagccaaacgtgctgatcctgggctctggctggggcgccatcagctttctgaagcacatcgacaccaagaagtacaacgtctccatcatcagccccagaaagtacttcctgcacacgcccctgctgccctctgccccagtgggaaccgtggacgagaagtccatcatcgagcccatcgtgaacttcgccctgaagaaaaagggcaacgtcacctactacgaggccgaagccaccagcatcaaccccgaccggaacaccgtgaccatcaagagcctgagcgccgtgtcccagctgtaccagcccgagaaccacctgggcctgcaccaggccgagcccgccgagattaagtacgactacttaatcagcgccgtgggtgccgagcccaacacctttggaatccccggcgtcaccgactacggccacttcctggaggagatccccaacagcctggaaatccggcggaccttcgccgccaacctggaagaggctaacctgctgcctaagggcgaccccgagcggagaaggctgctgtccatcgtggtcgttggcggtggccccacaggcgtggaagctgctggcgaactgcaggactacgttcaccaggacctgagaaagttcctgcccgccctggccgaggaagtgcagattcacctggtggaagccctgcccatcgtgctgaatatgttcgagaagaagctgagcagctacgcccagagccacctggaaaacacctccatcaaggtgcacctgagaaccgctgtggccaaggtggaagagaagcagctgttggccaagaccaagcacgaggacggcaagattaccgaggaaaccattccctacggcaccctgatttgggccaccggcaacaaggccagacccgtgatcaccgacctgttcaagaagatccccgagcagaacagcagcaagagaggcctggccgtgaacgacttcctgcaggtcgagggcagcaacaacatcttcgccatcggcgacaacgcctttagcggcctgcctcctacagcccaggtggcccaccaggaagccgagtacatcgccaagaacttcgacaagatggcccagatcccaaatttccagaagaacctgtcctccagaaaggataagatcgacctgctgttcgaggagaacaacttcaagcccttcaagtacaacgacctgggcgccctggcctacctgggcagcgaaagagccattgccaccatcagaagcggtaagcggaccttctacaccggcggtggcctgatgaccttctacctgtggcggatcttgtacttgagcatgatcctgagcgcccgcagcagactgaaggtgttcttcgactggatcaagctggccttcttcaagagggacttcttcgagggactgtga

SEQ ID NO: 509 - DNA, 1542 bp, Artificial Sequence
  source: /note="Description of Artificial Sequence: Synthetic polynucleotide"
atgctgagcaagaacctgtacagcaacaagaggctgctgaccagcaccaacaccatggtgcgcttcgccagcaccagatccaccggcgtcgaaaacagcggggctggccccaccagcttcaagaccatgaaggtcattgacccccagcacagcgacaagcccaacgtgctgatcctgggttctggctggggcgccattagctttctgaagcacatcgacaccaagaagtacaacgtcagcatcatcagccccagaaagtacttcctgtttacccccctgctgcccagcgccccagtgggaaccgtggacgagaagtccatcatcgagcccatcgtgaacttcgctctgaagaaaaagggcaacgtcacctactacgaggccgaggccaccagcatcaaccccgaccggaacaccgtgaccatcaaaagcctgagcgccgtgtcccagctgtaccagcccgagaaccacctgggcatgcaccaggccgagcccgccgagattaagtacgactacctgatcagcgccgtgggcgccgagcccaacacctttggaatccctggcgtgaccgactacggccacttcttcgaggagatccccaacagcctggaaatccggagaaccttcgccgccaacctggaaaaggccaacctgctgcctaagggtgatcccgagcggagaaggctgctgagcatcgtggtcgtgggcggaggccccactggcgtggaagctgctggcgagctgcaggactacgtgcaccaggacctgcggaagttcctccccgccctggccgaggaagtgcagattcacctggtggaagccctgcccatcgtgctgaacatgttcgagaaggagctgagcagctacgcccagagccacctggaaaacacctcgatcaaggtgcatctgagaaccgccgtggccaaggtggaagagaagcagctgctggccaagaccaaacacgaggacggcaagattaccgaggaaaccatcccctacggcaccctgatttgggccaccggtaacaaggccagacccgtgatcaccgacctgttcaagaagatccctgagcagaacagcagcaagagaggcctggccgtgaacgacttcctgcaggtgaaaggcagcaacaacatcttcgccatcggcgacaacgcctttagcgggctgcctcctacagcccaggtggcccaccaggaagccgagtacatcgccaagaacttcgacaagatggctcaaatccccaatttccagaagaacctgtcctcccggaaggataagatcgacctgctgttcgaggaaaacaacttcaagcccttcaagtacaacgacctgggtgccctggcctacctgggcagcgaaagagccattgccaccatcagaagcggcaagcggaccttctacaccggcggaggcctgatgaccttctacctgtggcggatcttgtacatgagcatgatcctgagcgcccgcagcagactgaaggtgttcttcgactggattaagctggccttcttcaagagggacttcttcgagggcctgtag

SEQ ID NO: 510 - DNA, 1542 bp, Artificial Sequence
  source: /note="Description of Artificial Sequence: Synthetic polynucleotide"
atgctgtcgaagaacctgtacagcaacaagcggctgctgaccagcaccaacaccatggtgcgcttcgccagcaccagatccaccggcgtcgaaaacagcggggctggccccaccagcttcaagaccatgaaggtcattgacccccagcacagcgacaagcccaacgtgctgatcctgggctcgggctggggcgccatcagctttttaaagcacatcgacaccaagaagtacaacgtcagcatcatcagccccagaagctacttcctgcacacccccctgctgcccagcgcccctgtgggaaccgtggacgagaagtccatcatcgagcccatcgtgaacttcgccctgaagaaaaagggcaacgtcacctactacgaggccgaggccaccagcatcaaccccgaccggaacaccgtgaccatcaagaacctgagcgccgtgtcccagctgtaccagcccgagaaccatctgggcatgcaccaggccgagcccgccgagattaagtacgactacctgatcagcgccgtgggcgccgagcccaacacctttggaatccccggcgtgaccgactacggccacttcctgaaagagatccccaacagcctggaaatccggcggaccttcgccgccaacctggaaaaggccaacctgctgcctaagggcgaccccgagcggagaaggctgctgagcatcgtggtcgtgggcggaggccccacaggcgtggaagccgctggcgagctgcaggactatgtgcaccaggacctgcggaagttcttccccgccctggccgaggaagtgcagattcacctggtggaagccctgcccatcgtgctgaatatgttcgagaaagagctttcaagctacgcccagagccatctggaaaacacctccatcaaggtgcacctgagaaccgccgtggccaaagtggaagaaaagcagttgctggccaagaccaagcacgaggacggtaaaattaccgaggaaaccatcccctacggcaccctgatttgggccaccggcaacaaggccagacccgtgatcaccgacctgttcaagaagatccccgagcaaaacagctccaagcggggcctggccgtgaacgacttcctgcaggtgaaaggcagcaacaacatcttcgccatcggcgacaacgcctttagcggcctgccacctacagcccaggtggcccaccaggaagccgaatacatcgccaagaacttcgacaagatggcccagatccccaatttccagaagaacctgtcctcccggaaggataagatcgacctgctgttcgaggaaaacaacttcaagcccttcaagtacaacgacctgggcgccctggcctacctgggcagcgaaagagccattgccaccatcagaagcggcaagagaacattctacaccggcggaggcctgatgaccttctacctgtggcagatcctgtacatgagcatgatcctgagcgcaagaagcagactgaaggtgttcttcgactggatcaagctggccttcttcaagagagacttctttaagggcctgtag

SEQ ID NO: 511 - DNA, 1542 bp, Artificial Sequence
  source: /note="Description of Artificial Sequence: Synthetic polynucleotide"
atgctgagcaagaacctgtacagcaacaagcggctgctgaccagcaccaacaccctcgtgcgcttcgccagcaccagatccaccggcgtcgaaaacagcggggcaggccccaccagcttcaagaccatgaaggtcatcgacccccagcacagcgacaagcccaacgtgctgatcctgggctctggctggggcgccatcagctttctgaagcacatcgacaccaagaagtacaacgtcagcatcatcagccctagaagctacttcctgcacacccctctgctgcccagcgcccctgtgggaaccgtggacgagaagtccattatcgagcccatcgttaacttcgccctcaagaaaaagggcaacgtcacctactatgaggccgaggccaccagcatcaaccccgaccggaacaccgtgaccatcaagaacctgagcgccgtgtcccagctgtaccaacccgagaaccacctgggcatgcaccaggccgaacccgccgagattaagtacgactacctgatcagcgccgtgggcgccgagcccaacacctttggtatccctggcgtgaccgactacggtcacttcttcgaggagatccccaacagcctggaaatccggcggaccttcgccgccaatctggaagaggccaacctgctgcctaagggcgaccccgagagaagaaggctgctgagcattgtggtcgtgggcggaggccccacaggcgtggaggctgctggcgagctgcaggactacgttcaccaggacctgcggaagttcttccccgccctggccgaggaagtgcagattcacctggtggaagccctgcccatcgtgctgaacatgttcgagaaaaagctgagcagctacgcccaaagccacctggaaaacacctccatcaaggtgcacctgagaaccgccgtggccaaagtggaagagaagcagctgctggcaaagaccaagcacgaggacggcaagattaccgaggaaaccatcccctacggcactctgatttgggccaccggcaacaaggccagacccgtgatcaccgacctgttcaagaaaatccccgagcagaacagcagcaagcggggcctggccgtgaacgacttcctgcaggtcaaaggcagcaacaacatcttcgccatcggcgacaacgcctttagcggcctgcctcctacagcccaggtggcccaccaggaagccgagtacctggccaagaacttcgacaagatggcccagatccccaatttccagaagaacctgtcctcacggaaggataagatcgacctgctgttcgaggaaaacaacttcaagcctttcaagtacaacgacctgggcgccctggcatacctgggcagcgaaagagccattgccaccatcagaagcggcaagcggaccttctacaccggcggaggcctgatgaccttctacctgtggcggatcctgtacatgagcatgatcctgagcgcccgcagcagactgaaggtgttcttcgactggattaaactggccttcttcaagagggacttcttcgagggcctgtga

SEQ ID NO: 512 - DNA, 1542 bp, Artificial Sequence
  source: /note="Description of Artificial Sequence: Synthetic polynucleotide"
atgctgagcaagaacctgtacagcaaccggcggctgctgaccagcaccaacaccctcgtgcgcttcgccagcaccagatccaccggcgtcgaaaacagcggggctggccccaccagcttcaagaccatgaaggtcatcgacccccagcacagcgacaagcccaacgtgctgatactgggctctggctggggcgccatcagctttttaaagcacatcgacaccaagaagtacaacgtctccatcatcagccccagaaagtacttcttacacacccccctgctgccctctgcccctgtgggaaccgtggacgagaagtccatcatcgagcccatcgtgaacttcgccctgaagaaaaagggcaacgtcacctactacgaggccgaggccaccagcatcaaccccgacaggaacaccgtgaccatcaagaacctgagcgccgtgtcccagctgtaccagcccgagaaccacctgggcctgcaccaggccgagcccgccgagattaagtacgattacctgatcagtgccgtgggcgccgagcccaacacctttggaatccctggcgtgaccgactacggccacttcttcaaagagatccccaacagcctggaaatccggcggaccttcgccgccaatctggaaaaggccaacctgctgcctaagggcgaccccgagcggagaaggctgctgagcattgtcgtcgtgggcggagggcccacaggcgtggaagctgctggcgagctgcaggactacgtgcaccaggacctgcggaagttcctgcccgccctggccgaggaagtgcagattcacctggtggaagccctgcccatcgtgctgaacatgttcgagaagaagctgagcagctacgcccagagccacctggaaaacacttccatcaaggtgcacctgagaaccgccgtggccaaggtggaagagaagcagctgctggccaagaccaagcacgaggacggcaagattaccgaagaaaccatcccctacggcaccctgatttgggccaccggcaacaaggccagacccgtgatcaccgacctgttcaagaagatccccgagcagaacagcagcaagagaggcctggcagtgaatgacttcctgcaggtcgagggcagcaacaacatcttcgccatcggcgacaacgcctttagcgggctgcctcctacagcccaggtggcccaccaggaagccgagtacatcgccaagaactttgacaagatggcccagatccccaatttccaaaagaacctgtcctcccggaaggataagatcgacctgctgttcgaggaaaacaactttaagcccttcaagtacaacgacttaggtgccctggcatacctgggcagcgaaagagccattgcaaccatcagatccggcaagcggacattctacaccggcggaggcctgatgaccttctacctgtggcggatcctgtacctgagcatgatcctgagcgcccgcagcagactgaaggtgttcttcgactggatcaagatggccttcttcaagagggacttcttcaagggcctgtga

SEQ ID NO: 513 - DNA, 1542 bp, Artificial Sequence
  source: /note="Description of Artificial Sequence: Synthetic polynucleotide"
atgctgagcaagaacctgtacagcaaccggcggctgctgaccagcaccaacaccctcgtgcgcttcgctagcaccagatccaccggcgtcgaaaacagcggggctggccccacaagcttcaagaccatgaaggtcatcgacccccagcacagcgacaagcccaacgtgctgatcctgggctctggctggggcgctatcagctttctgaagcacatcgacaccaagaagtacaacgtcagcatcatcagccccagaaagtacttcctgtttacccccctgctgcccagcgcccctgtgggaaccgtggacgagaagtccattatcgagcccatcgtgaatttcgccctgaagaaaaagggcaacgtcacctactacgaggccgaggccaccagcatcaaccccgacaggaacaccgtgaccatcaagaacctgagcgccgtgagccagctgtaccaacccgagaaccacctgggcatgcaccaggccgagcccgccgagattaagtacgactacctgatcagcgccgtgggtgccgagcccaacacctttggaatccccggcgtgaccgattacggccacttcctggaggagatccccaacagcctggaaatccggcggaccttcgccgccaacctggaagaggctaacctgctgcctaagggcgaccccgagcggagaaggctgctgagcatcgtggtcgtgggtggaggccccacaggcgtagaagctgctggcgagctgcaggactacgttcaccaggacctgagaaagttcttccccgccctggccgaggaagtgcagattcacctggtggaagccctgcccatcgtgctgaacatgttcgagaagaagctgagcagctacgcccagagccacctggaaaacacctccatcaaggtgcacctgagaaccgccgtcgccaaggtggaagagaagcagctgctggccaagaccaagcacgaggacggcaagattaccgaggaaaccatcccctacggtaccctgatttgggccaccggcaacaaggccagacccgtgatcaccgaccttttcaagaagatccccgagcagaacagcagcaagagaggcttggccgtgaacgacttcctgcaggtcaaaggcagcaacaacatcttcgccatcggcgacaacgcctttgccggcttgcctcctacagcccaagtggcccaccaggaagccgagtacatcgccaagaacttcgacaagatggcccagatcccaaatttccagaagaacctgtcctcccggaaggataagatcgacctgctgttcgaggaaaacaacttcaagcccttcaagtacaacgacttaggcgccctggcctacctgggcagcgaaagagccattgccaccatcagaagcggcaagcggaccttctacaccggcggaggcctgatgaccttctacctgtggcggatcctgtacatgtccatgattctgagcgcccgcagcagactgaaggtgttcttcgactggatcaagatggcctttttcaagagggacttcttcaagggcctgtga

SEQ ID NO: 514 - DNA, 1542 bp, Artificial Sequence
  source: /note="Description of Artificial Sequence: Synthetic polynucleotide"
atgctgagcaagaatctgtacagcaacaagcggctgctgaccagcaccaacacgatggtgcgcttcgcttccaccagatccaccggcgtcgaaaacagcggggctggccccaccagcttcaagaccatgaaggtcatcgacccccagcacagcgacaaacccaacgtgctgatcctgggctctggctggggcgccatcagctttctgaagcacatcgacaccaagaagtacaacgtcagcatcatcagccccagaaagtacttcctgcacacccccctgatgcccagcgcccctgtgggaaccgtggacgaaaagtccatcatcgagcccatcgtgaacttcgctctgaagaaaaagggcaacgtcacctactacgaggccgaggccaccagcatcaaccccgaccggaacaccgtgaccatcaagaacctgagcgccgtgtcccagctgtaccagcccgagaaccacctgggcctgcaccaggccgagcccgccgagattaagtacgactacctgatcagcgccgtgggcgccgagcccaacacctttggaatccccggcgtgaccgactacggccacttcttcaaagagatccccaacagcctggaaatcagacggaccttcgccgccaacctggaagaggccaacctgttgcctaagggcgatcccgagcggagaaggctgctgagcatcgtggtcgtgggcggaggccccacaggcgtggaagccgctggcgagctgcaggactacgtgcaccaggacctgcggaagtttctgcctgccctggccgaggaagtgcaaattcacctggtggaagctctgcccatcgtgctgaacatgttcgagaaggagctgagcagctacgcccagagccacctggaaaacacctccatcaaggtgcacctgagaaccgccgtggccaaggtggaagagaagcagttgctggccaagaccaagcacgaggacggcaagattaccgaggaaaccatcccatacggcactctgatttgggccaccggcaacaaggccagacccgtgatcaccgacctgttcaagaaaatccccgagcagaacagcagcaagcggggcttggccgtgaacgacttcctgcaggtcaaaggcagcaacaacattttcgccatcggcgacaacgcatttgccggcctgcctcctacagcccaggtggcccaccaggaagccgagtacctggccaagaacttcgacaagatggcccagatccccaatttccagaagaacctgtcttcccggaaggataagatcgacctgctgttcgaggaaaacaacttcaagcccttcaagtacaacgacctgggcgccctggcctacctgggcagcgaaagagccattgccaccatcagaagcggcaagcggaccttctacaccggcggaggcctgatgaccttctacttatggcggatcctgtacttgtccatgatcctgagcgcccgcagcagactgaaggtgtttttcgactggatcaagctggccttcttcaagagggacttcttcgagggcttatga

SEQ ID NO: 515 - DNA, 1542 bp, Artificial Sequence
  source: /note="Description of Artificial Sequence: Synthetic polynucleotide"
atgctgagcaagaacttgtacagcaacaagcggctgctgacctcgaccaacaccctcgtgcgcttcgccagcaccagatccaccggcgtcgaaaacagcggggctggccccacaagcttcaagaccatgaaggtcatcgacccccagcacagcgacaagcccaacgtgctgatcctgggctctggctggggcgccattagctttctgaagcacatcgacaccaagaagtacaacgtcagcatcatcagccccagaaagtacttcctgttcacccccctgctgcccagcgcccctgtgggaaccgtggacgagaagtccatcatcgagcccatcgttaacttcgccctgaagaaaaagggcaacgtcacctactacgaggccgaggccaccagcatcaaccccgaccggaacaccgtgaccatcaagagcctgagcgccgtttcccagctgtaccagcccgagaaccacctgggcatgcaccaggccgagcccgccgagattaagtacgactacctgatcagcgccgtaggcgccgagcccaacacctttggaatccccggcgtgaccgattacggccacttcttcgaggagatccccaacagcctggaaatccggcggaccttcgccgccaacctggaagaggccaacctgctgcctaagggcgaccccgagcggagaaggctgctgagcatcgtggtcgtgggcggtgggcctacaggcgtggaagctgctggcgagctgcaggactacgtgcaccaggacctgagaaagttcttccctgccctggccgaggaagtgcagattcacctggtggaagccctgcccatcgtgctgaacatgttcgagaagaagctgagcagctacgcccagagccacctggaaaacacttccatcaaggtgcacctgagaacggccgtggccaaggtggaagaaaagcagctgctggccaagaccaagcacgaggacggcaagattaccgaggaaaccatcccctacggcaccctgatttgggccaccggcaacaaggccagacccgtgatcaccgacctgttcaagaagattcctgagcagaacagcagcaagcggggcctggccgtgaacgacttcttgcaggtcgagggcagcaacaacatcttcgccatcggcgacaacgcctttgccggcctgcctcctaccgcccaggtggcccaccaggaagccgagtacctggccaagaactttgacaagatggcccagatacccaatttccagaagaacctgtcctcccggaaggataaaattgacctcttgttcgaggaaaacaacttcaagcccttcaaatacaacgacctgggcgccctggcctacctgggcagcgaaagagccattgccaccatcagaagcggcaagcggaccttctacaccggcggaggcttaatgaccttctacttatggcagatcctgtacctgagcatgatcctgagcgcccgcagcagactgaaggtgttcttcgactggatcaagctggccttcttcaagagggacttcttcgagggcctgtga

SEQ ID NO: 516 - DNA, 1542 bp, Artificial Sequence
  source: /note="Description of Artificial Sequence: Synthetic polynucleotide"
atgctgagcaagaacctgtacagcaaccggcggctgctgaccagcaccaataccctcgtgcgcttcgccagcaccagatccaccggcgtggaaaacagcggggctggccccacaagctttaagaccatgaaggtcatcgaccctcagcacagcgacaaacccaacgtgctgatcctgggctctggctggggcgccatcagctttctgaagcacatcgacaccaagaagtacaacgtcagcatcatcagccccagaaagtacttcctgttcacccccctgatgcccagcgcccctgtgggaaccgtggacgagaagtccatcatcgagcccatcgtgaacttcgccctgaagaaaaagggcaacgttacctactacgaggccgaggccaccagcatcaaccccgaccggaacaccgtgaccatcaagaacctgagcgccgtgagccagctgtaccagcctgaaaaccacctggggctgcaccaggccgagcccgccgagattaagtacgactacctgatcagcgccgtgggcgccgagcccaacacctttggaatccccggcgtgaccgactacggccatttcctggaggagatccccaacagcctggaaatccggagaaccttcgccgccaacctggaagaggccaacctgctgcctaagggcgaccccgagcggagaaggctgctgagcatcgtggtcgtgggcggagggcccacaggcgtggaagctgctggcgagctgcaggactacgtgcaccaggacctgcggaagttcctgcccgccctggccgaggaagtgcagattcacctggtggaagccctgcccatcgtgctgaatatgttcgagaagaagctgagcagctacgcccaaagccacctggaaaacacctccatcaaggtgcacctgagaaccgccgtcgccaaggttgaagagaagcagctgctggccaagaccaagcacgaggacggcaagattaccgaggaaaccatcccctacggcaccctgatttgggccaccggcaacaaggccagacccgtgatcaccgacctgttcaagaagatccccgagcagaactcgtccaagcggggcctggccgtgaacgacttcttgcaggtcaaaggcagcaacaacatcttcgccatcggcgacaacgcctttagcggcctgcctcctacagcccaagtggcccaccaggaggccgagtacatcgccaagaacttcgacaagatggcccagatccccaatttccagaagaacctgtcctcccggaaggataagatcgacctgctgttcgaggaaaacaacttcaagcccttcaagtacaacgacctgggcgccctggcctacctgggcagcgaaagagccattgccaccatcagaagcggcaagcggaccttctacaccggcggaggcctgatgaccttctacctgtggcagatcctgtacctgagcatgatcctgagcgcacgcagcagattaaaggtgttcttcgactggattaagctggccttcttcaagagggactttttcaagggcctgtga

SEQ ID NO: 517 - DNA, 1542 bp, Artificial Sequence
  source: /note="Description of Artificial Sequence: Synthetic polynucleotide"
atgctgagcaagaacctgtacagtaaccggcggctgctgaccagcaccaacaccctcgtgcgcttcgccagcaccagatccaccggcgtcgaaaacagcggggcaggccctaccagctttaagaccatgaaggtcatcgaccctcagcacagcgacaagcccaacgtgctgatcctgggctctggctggggcgccatcagctttctgaagcacatcgacaccaagaagtacaacgtcagcatcatcagccccagaagctacttcctgcacacccccctgctgcccagcgcccctgtgggaaccgtggacgagaagtccattatcgagcccatcgtgaacttcgccctgaagaaaaagggcaacgtcacctactatgaggccgaagccaccagcatcaaccccgaccggaacaccgtgaccatcaagagcctgagcgccgtgtcccagctgtaccagcccgagaaccacctgggcatgcatcaggccgagcccgccgagattaagtacgactacctgatcagcgccgtgggcgccgagcccaacacctttggaatccccggcgtgaccgactacggccacttcttcgaggagatccccaactctctggaaatacggcggaccttcgccgccaacctggaaaaggccaacctgctgcctaagggcgaccccgagcggagaaggctgctgagcatcgtggtcgtgggcggaggccctacaggcgtggaagctgctggcgagctgcaggactacgtgcaccaggacctgcggaagttcctgcctgccctggccgaggaagtgcagattcacctggtggaagccctgcccatcgttctgaacatgttcgagaaggagcttagcagctacgcccagagccacctggaaaacacctccatcaaggtgcatctgagaaccgccgtggccaaggtggaagagaagcagctgctggccaagaccaagcacgaggacggcaagattaccgaggaaaccattccctacggtaccctgatttgggccaccggcaacaaggccagacccgtaatcaccgaccttttcaagaagatccccgagcaaaacagcagcaagcggggactggccgtgaacgacttcctgcaggtcgagggcagcaacaacattttcgccatcggcgacaacgcctttgccggcctgccacctacagcccaggtggcccaccaggaagccgagtacctggccaagaacttcgacaagatggcccagatccccaatttccagaagaacctgtcctcccggaaggataaaatcgacctgctgttcgaggaaaacaacttcaagcccttcaagtacaacgacctgggcgccctggcctacctgggaagcgaaagagccattgccaccatcagaagcggcaagcggaccttctacaccggtggaggcctgatgaccttctacctgtggcggatcctgtacatgagcatgatcctgagcgcccgcagcagactgaaggtgttcttcgactggatcaagatggccttcttcaaaagggacttcttcgagggcctgtga

SEQ ID NO: 518 - DNA, 1542 bp, Artificial Sequence
  source: /note="Description of Artificial Sequence: Synthetic polynucleotide"
atgctgagcaagaacctgtacagtaacaagcggctgctgaccagcaccaacaccatggtgcgcttcgccagcaccagatccaccggcgtcgaaaacagcggggctggccccaccagcttcaagaccatgaaggtcatcgacccccagcacagcgacaagccaaacgtgctgatcctgggctctggctggggcgccatcagctttctgaagcacatcgacaccaagaagtacaacgtcagcatcatcagccccagaaagtacttcctgttcacccctctgatgcccagcgcccctgtggggaccgtggacgagaagtcaatcatcgagcccatcgttaacttcgccctgaagaaaaagggcaacgttacctactacgaggcagaggccaccagcatcaaccccgaccggaacaccgtgaccatcaagagcctgagcgccgtgtcccagctgtaccaacccgagaaccacctgggcatgcaccaggccgagcccgccgagattaagtacgactacctgatcagcgccgtaggcgccgagcccaacacctttggaatccccggcgtgaccgactacggccacttcctggaggaaatccccaacagcctggaaatccggcggaccttcgccgccaatctggagaaggccaacctgctgcctaagggcgaccccgagcggagaaggctgctgagcattgtggtcgtgggtggaggccccacaggcgtggaagctgctggcgagctgcaggactacgtgcaccaggacctgcggaagtttctgcccgccctggccgaggaagtgcagattcacctggtggaagccctgcccatcgtgctgaacatgttcgagaaggagcttagcagctacgcccagtcacacctggaaaacacctcgatcaaggtgcacctgagaaccgccgtggccaaggtggaagagaagcagctgctggccaagaccaagcacgaggacggcaagattaccgaggaaaccatcccctacggcaccctgatttgggccaccggcaacaaggccagacccgtgatcactgacctgttcaagaaaatccccgagcagaacagcagcaagcggggactggccgtgaacgacttcctgcaggtcgagggcagcaacaacatcttcgccatcggcgacaacgcctttgccggcctgcctcctacagcccaggtggcccaccaggaagccgagtacatcgccaagaacttcgacaagatggcccagatccccaatttccagaagaacctgtcctcccggaaggataagatcgacctgctgttcgaggaaaacaacttcaagcccttcaagtacaacgatctgggtgccctggcctacctgggcagcgaaagagccattgccaccatcagaagcggcaagcggaccttctacaccggtggaggcctgatgaccttctacctgtggcagatcttgtacctgagcatgatcctgagcgcccgcagcagactgaaggtgtttttcgactggatcaagctggccttcttcaagagggacttcttcgagggactgtga

SEQ ID NO: 519 - DNA, 1542 bp, Artificial Sequence
  source: /note="Description of Artificial Sequence: Synthetic polynucleotide"
atgctgagcaagaacctgtacagcaacaagcggctgctgaccagcaccaacaccctcgtgcgcttcgctagcaccagatccaccggcgtcgaaaacagcggagcaggccccacaagcttcaagaccatgaaggtcatcgacccccagcacagcgacaagcccaacgtgctgatcctgggctctgggtggggagccatcagctttttaaagcacatcgacaccaagaagtacaacgtctccatcatcagccccagaaagtacttcctgcacacccccctgctgcccagcgcacctgtgggaaccgtggacgagaagtccatcatcgagcccatcgtgaacttcgccctgaagaaaaagggcaacgtcacctactatgaggcagaggccaccagcatcaaccccgacaggaacaccgtgaccatcaagagcctgagcgccgtgtcccagctgtaccagcccgagaaccacctaggcatgcaccaagccgagcccgctgagattaagtacgactacctgatcagcgccgtgggcgccgagcctaacacctttggaatccccggcgtcaccgactacggccacttcctggaggagatccccaacagcctggaaatccggcggaccttcgccgccaacctggaagaggccaacctgctgcctaagggtgaccccgagcggagaaggctgctgtccatcgtcgtcgtgggtggaggccccacaggtgtggaagctgctggcgagctgcaggactacgtgcaccaggacctgcggaagttcttccccgccctggccgaggaagtgcagattcacctggtggaagccctgcccatcgtgctgaacatgttcgagaaggagctgagcagctacgcccagagccacctggaaaacacctccatcaaggtgcacctgagaaccgccgtggccaaggtggaagagaagcagctgctggccaagaccaagcacgaggacggcaagattaccgaggaaactatcccctacggcaccctgatttgggccaccggcaacaaggccagacccgtgatcaccgacctgttcaagaagatccccgagcagaacagcagcaagcggggcctggccgtgaacgacttcctgcaggtcgagggcagcaacaacatcttcgccatcggcgacaacgcctttgccggcctgcctccaacagcccaggtggcgcaccaggaagccgagtacctggccaagaacttcgacaagatggctcagatccccaatttccagaagaacctgtcctcccggaaggataagatcgacctgctgttcgaggaaaacaacttcaagcccttcaagtacaacgacttaggcgccctggcatacctgggcagcgaaagagccattgccaccatcagaagcggcaagcggaccttctacaccggcggaggcctgatgaccttctacctgtggcggatcctgtacatgagcatgatcctgagcgcccgctcgagactgaaggtgttcttcgactggatcaagatggccttcttcaagagggacttcttcaagggcctgtga

SEQ ID NO: 520 - DNA, 1542 bp, Artificial Sequence
  source: /note="Description of Artificial Sequence: Synthetic polynucleotide"
atgctgtcgaagaatctgtacagcaaccggaggctgctgaccagcaccaacaccctcgtgcgcttcgccagcaccagatccaccggcgtcgaaaacagcggggctggccccacctctttcaagaccatgaaggtcatcgacccccagcacagcgacaagcccaacgtgctgatcctgggctcgggctggggcgccatcagctttctgaagcacatcgacaccaagaagtacaacgtcagcatcatcagccccagaaagtacttcctgttcacccccctgctgcccagcgcccctgtgggaaccgtggacgagaagtccattatcgagcccatcgtgaacttcgccctgaagaaaaagggcaacgtcacctactatgaggccgaggccaccagcatcaaccccgaccggaacaccgtgaccataaaatcactgagcgccgtgtcccagctgtaccagcctgagaaccatctaggcatgcaccaggccgagcccgccgagattaagtacgactacctgatcagcgccgtgggcgccgagcccaacacatttggaatccccggcgtgactgattacggtcacttcttcgaggagatccccaacagcctggaaatccggcggaccttcgccgccaacctagaagaggccaacctgctgcctaagggcgaccccgagcggagaaggctgctgagcatcgtggtcgtgggcggaggccccacaggcgtggaagctgctggcgagctgcaggactacgtgcaccaggacctgcggaagttcttccccgccctggccgaggaagtgcagattcacctggtcgaagccctgcccatcgtgctgaacatgttcgagaagaagctgagcagctacgcccagagccacctggaaaacacctccatcaaggtgcacctgagaaccgccgtggccaaggtggaagagaagcagctgctggccaagaccaagcacgaggacggcaagattaccgaggaaaccatcccctacggcaccctgatttgggccaccggcaacaaggccagacccgtgatcactgacctgttcaagaagatccctgagcagaacagcagcaagcggggcctggccgtgaatgacttcctgcaggtcaaaggcagcaacaacatcttcgccatcggcgacaacgcctttgccggcctgcctcctacagcccaggtggcccaccaggaagccgaatacatcgccaagaacttcgacaagatggcccagatccccaatttccagaagaacctgtcctcccggaaggataagatcgacctgctgttcgaggaaaacaacttcaagcccttcaagtacaacgacctgggcgccctggcctacctgggcagcgaaagagccattgcaaccatccgtagcggcaagcggaccttctacaccggcggaggcctgatgaccttctacttatggcggatcctgtacatgagcatgatcctgagcgcccgctcgagactgaaggtgtttttcgactggatcaagctggccttcttcaagagggacttcttcgagggcctgtga

SEQ ID NO: 521 - DNA, 1542 bp, Artificial Sequence
  source: /note="Description of Artificial Sequence: Synthetic polynucleotide"
atgctgagcaagaacctgtacagcaacaagcggttgctcaccagcaccaacaccatggtgcgcttcgccagcaccagatccaccggcgtcgaaaacagcggggctggccccaccagcttcaagaccatgaaggtcatcgacccccagcacagcgacaagcccaacgtgctgatcctgggctctggctggggcgccatcagctttctgaagcacatcgacaccaagaagtacaacgtcagcatcatctctcccagaagctatttcctgttcacccccctgctgcccagcgcccctgtgggaaccgtggacgagaagtccatcatcgagcccatcgtgaacttcgccctgaagaaaaagggcaacgtcacctactacgaggccgaggccaccagcatcaaccccgaccggaacaccgtgaccatcaagaacctgagcgccgtgtcccagctgtaccagcccgagaaccacctaggcatgcaccaggccgagcccgccgagattaagtacgactacctgatcagcgccgtgggcgccgagcccaacacctttggaattcccggcgtgaccgactacggccacttcttcgaggagatccccaactctctggaaatccggcggaccttcgccgccaacctggaagaggctaacctgctgcctaagggcgaccccgagcggagaaggctgctgagcatcgtggtggtgggcggaggccccactggcgtggaggctgctggcgagctgcaggactacgttcaccaggacctgcggaagttcctgcccgccttggccgaggaagtgcagattcacctggtggaagccctgcccatcgtgctgaacatgttcgagaagaagctgagcagctacgcccagagccacttagaaaacacctccatcaaagtgcacctgagaacggccgtggccaaggtggaagaaaagcagctgctggccaagaccaagcacgaggacggcaagattaccgaggaaaccatcccatacggcaccctgatttgggccaccggcaacaaggccagacccgtgatcaccgacctgttcaagaagatccccgagcagaacagcagcaagcggggcctggccgtgaacgacttcctgcaggtcaaaggcagcaacaacatcttcgccatcggcgacaacgcctttgccggcctgcctcctacagcccaggtggcccaccaagaagccgaatacatcgccaagaacttcgacaagatggcccagatccccaatttccagaagaatctatcctcccggaaggataagatcgacctgctgttcgaggaaaacaacttcaagcccttcaagtacaacgatctgggcgccctggcatacctgggcagcgaaagagccattgccaccatccgttccggcaagcggaccttctacaccggcggaggcctgatgaccttctacctgtggcagatcctgtacatgagcatgatcctgagcgcccgctcgagactgaaggtgttcttcgactggatcaagctggcattcttcaagagggacttcttcgagggcctgtga

SEQ ID NO: 522 - DNA, 1542 bp, Artificial Sequence
  source: /note="Description of Artificial Sequence: Synthetic polynucleotide"
atgctgagcaagaacctgtacagcaaccggcggctgctgaccagcaccaacaccctcgtgcgcttcgccagcaccagatccaccggcgtcgaaaacagcggggctggccccaccagcttcaagaccatgaaggtcatcgacccccagcacagcgacaagcccaacgtgctgatcctgggctctggctggggcgccatcagctttctgaagcacatcgacaccaagaagtacaacgtcagcatcatcagccccagaaagtacttcctgttcacccccctgctgcccagcgcccctgtgggaaccgtggacgagaagtccatcatcgagcccatcgtgaacttcgccctgaagaaaaagggcaacgtcacctactacgaggccgaggccaccagcatcaaccccgaccggaacaccgtgaccatcaagaacctgagcgccgtgtcccagctgtaccagcccgagaaccacctgggcctgcaccaggccgagcccgccgagattaagtacgactacctgatcagcgccgtgggcgccgagcccaacacctttggaatccccggcgtgaccgactacggccacttcttcaaagagatccccaacagcctggaaatccggcggaccttcgccgccaacctggaagaggccaacctgctgcctaagggcgaccccgagcggagaaggctgctgagcatcgtggtcgtgggcggaggccccacaggcgtggaagctgctggcgagctgcaggactacgtgcaccaggacctgcggaagttcttccccgccctggccgaggaagtgcagattcacctggtggaagccctgcccatcgtgctgaacatgttcgagaagaagctgagcagctacgcccagagccacctggaaaacacctccatcaaggtgcacctgagaaccgccgtggccaaggtggaagagaagcagctgctggccaagaccaagcacgaggacggcaagattaccgaggaaaccatcccctacggcaccctgatttgggccaccggcaacaaggccagacccgtgatcaccgacctgttcaagaagatccccgagcagaacagcagcaagcggggcctggccgtgaacgacttcctgcaggtcgagggcagcaacaacatcttcgccatcggcgacaacgcctttagcggcctgcctcctacagcccaggtggcccaccaggaagccgagtacctggccaagaacttcgacaagatggcccagatccccaatttccagaagaacctgtcctcccggaaggataagatcgacctgctgttcgaggaaaacaacttcaagcccttcaagtacaacgacctgggcgccctggcctacctgggcagcgaaagagccattgccaccatcagaagcggcaagcggaccttctacaccggcggaggcctgatgaccttctacctgtggcagatcctgtacctgagcatgatcctgagcgcccgcagcagactgaaggtgttcttcgactggatcaagatggccttcttcaagagggacttcttcaagggcctgtga

SEQ ID NO: 523 - DNA, 1542 bp, Artificial Sequence
  source: /note="Description of Artificial Sequence: Synthetic polynucleotide"
atgctgagcaagaacctgtacagcaaccggcggctgctgaccagcaccaacaccctcgtgcgcttcgccagcaccagatccaccggcgtcgaaaacagcggggctggccccaccagcttcaagaccatgaaggtcatcgacccccagcacagcgacaagcccaacgtgctgatcctgggctctggctggggcgccatcagctttctgaagcacatcgacaccaagaagtacaacgtcagcatcatcagccccagaagctacttcctgttcacccccctgatgcccagcgcccctgtgggaaccgtggacgagaagtccatcatcgagcccatcgtgaacttcgccctgaagaaaaagggcaacgtcacctactacgaggccgaggccaccagcatcaaccccgaccggaacaccgtgaccatcaagagcctgagcgccgtgtcccagctgtaccagcccgagaaccacctgggcctgcaccaggccgagcccgccgagattaagtacgactacctgatcagcgccgtgggcgccgagcccaacacctttggaatccccggcgtgaccgactacggccacttcttcgaggagatccccaacagcctggaaatccggcggaccttcgccgccaacctggaagaggccaacctgctgcctaagggcgaccccgagcggagaaggctgctgagcatcgtggtcgtgggcggaggccccacaggcgtggaagctgctggcgagctgcaggactacgtgcaccaggacctgcggaagttcttccccgccctggccgaggaagtgcagattcacctggtggaagccctgcccatcgtgctgaacatgttcgagaaggagctgagcagctacgcccagagccacctggaaaacacctccatcaaggtgcacctgagaaccgccgtggccaaggtggaagagaagcagctgctggccaagaccaagcacgaggacggcaagattaccgaggaaaccatcccctacggcaccctgatttgggccaccggcaacaaggccagacccgtgatcaccgacctgttcaagaagatccccgagcagaacagcagcaagcggggcctggccgtgaacgacttcctgcaggtcaaaggcagcaacaacatcttcgccatcggcgacaacgcctttgccggcctgcctcctacagcccaggtggcccaccaggaagccgagtacatcgccaagaacttcgacaagatggcccagatccccaatttccagaagaacctgtcctcccggaaggataagatcgacctgctgttcgaggaaaacaacttcaagcccttcaagtacaacgacctgggcgccctggcctacctgggcagcgaaagagccattgccaccatcagaagcggcaagcggaccttctacaccggcggaggcctgatgaccttctacctgtggcggatcctgtacatgagcatgatcctgagcgcccgcagcagactgaaggtgttcttcgactggatcaagatggccttcttcaagagggacttcttcaagggcctgtga

SEQ ID NO: 524 - DNA, 1542 bp, Artificial Sequence
  source: /note="Description of Artificial Sequence: Synthetic polynucleotide"
atgctgagcaagaacctgtacagcaaccggcggctgctgaccagcaccaacaccatggtgcgcttcgccagcaccagatccaccggcgtcgaaaacagcggggctggccccaccagcttcaagaccatgaaggtcatcgacccccagcacagcgacaagcccaacgtgctgatcctgggctctggctggggcgccatcagctttctgaagcacatcgacaccaagaagtacaacgtcagcatcatcagccccagaaagtacttcctgttcacccccctgatgcccagcgcccctgtgggaaccgtggacgagaagtccatcatcgagcccatcgtgaacttcgccctgaagaaaaagggcaacgtcacctactacgaggccgaggccaccagcatcaaccccgaccggaacaccgtgaccatcaagaacctgagcgccgtgtcccagctgtaccagcccgagaaccacctgggcctgcaccaggccgagcccgccgagattaagtacgactacctgatcagcgccgtgggcgccgagcccaacacctttggaatccccggcgtgaccgactacggccacttcttcaaagagatccccaacagcctggaaatccggcggaccttcgccgccaacctggaagaggccaacctgctgcctaagggcgaccccgagcggagaaggctgctgagcatcgtggtcgtgggcggaggccccacaggcgtggaagctgctggcgagctgcaggactacgtgcaccaggacctgcggaagttcttccccgccctggccgaggaagtgcagattcacctggtggaagccctgcccatcgtgctgaacatgttcgagaagaagctgagcagctacgcccagagccacctggaaaacacctccatcaaggtgcacctgagaaccgccgtggccaaggtggaagagaagcagctgctggccaagaccaagcacgaggacggcaagattaccgaggaaaccatcccctacggcaccctgatttgggccaccggcaacaaggccagacccgtgatcaccgacctgttcaagaagatccccgagcagaacagcagcaagcggggcctggccgtgaacgacttcctgcaggtcaaaggcagcaacaacatcttcgccatcggcgacaacgcctttgccggcctgcctcctacagcccaggtggcccaccaggaagccgagtacatcgccaagaacttcgacaagatggcccagatccccaatttccagaagaacctgtcctcccggaaggataagatcgacctgctgttcgaggaaaacaacttcaagcccttcaagtacaacgacctgggcgccctggcctacctgggcagcgaaagagccattgccaccatcagaagcggcaagcggaccttctacaccggcggaggcctgatgaccttctacctgtggcggatcctgtacatgagcatgatcctgagcgcccgcagcagactgaaggtgttcttcgactggatcaagctggccttcttcaagagggacttcttcaagggcctgtga

SEQ ID NO: 525 - DNA, 1542 bp, Artificial Sequence
  source: /note="Description of Artificial Sequence: Synthetic polynucleotide"
atgctgagcaagaacctgtacagcaaccggcggctgctgaccagcaccaacaccatggtgcgcttcgccagcaccagatccaccggcgtcgaaaacagcggggctggccccaccagcttcaagaccatgaaggtcatcgacccccagcacagcgacaagcccaacgtgctgatcctgggctctggctggggcgccatcagctttctgaagcacatcgacaccaagaagtacaacgtcagcatcatcagccccagaagctacttcctgcacacccccctgctgcccagcgcccctgtgggaaccgtggacgagaagtccatcatcgagcccatcgtgaacttcgccctgaagaaaaagggcaacgtcacctactacgaggccgaggccaccagcatcaaccccgaccggaacaccgtgaccatcaagaacctgagcgccgtgtcccagctgtaccagcccgagaaccacctgggcctgcaccaggccgagcccgccgagattaagtacgactacctgatcagcgccgtgggcgccgagcccaacacctttggaatccccggcgtgaccgactacggccacttcctgaaagagatccccaacagcctggaaatccggcggaccttcgccgccaacctggaaaaggccaacctgctgcctaagggcgaccccgagcggagaaggctgctgagcatcgtggtcgtgggcggaggccccacaggcgtggaagctgctggcgagctgcaggactacgtgcaccaggacctgcggaagttcctgcccgccctggccgaggaagtgcagattcacctggtggaagccctgcccatcgtgctgaacatgttcgagaagaagctgagcagctacgcccagagccacctggaaaacacctccatcaaggtgcacctgagaaccgccgtggccaaggtggaagagaagcagctgctggccaagaccaagcacgaggacggcaagattaccgaggaaaccatcccctacggcaccctgatttgggccaccggcaacaaggccagacccgtgatcaccgacctgttcaagaagatccccgagcagaacagcagcaagcggggcctggccgtgaacgacttcctgcaggtcgagggcagcaacaacatcttcgccatcggcgacaacgcctttagcggcctgcctcctacagcccaggtggcccaccaggaagccgagtacctggccaagaacttcgacaagatggcccagatccccaatttccagaagaacctgtcctcccggaaggataagatcgacctgctgttcgaggaaaacaacttcaagcccttcaagtacaacgacctgggcgccctggcctacctgggcagcgaaagagccattgccaccatcagaagcggcaagcggaccttctacaccggcggaggcctgatgaccttctacctgtggcagatcctgtacatgagcatgatcctgagcgcccgcagcagactgaaggtgttcttcgactggatcaagatggccttcttcaagagggacttcttcgagggcctgtga

SEQ ID NO: 526 - DNA, 1542 bp, Artificial Sequence
  source: /note="Description of Artificial Sequence: Synthetic polynucleotide"
atgctgagcaagaacctgtacagcaaccggcggctgctgaccagcaccaacaccctcgtgcgcttcgccagcaccagatccaccggcgtcgaaaacagcggggctggccccaccagcttcaagaccatgaaggtcatcgacccccagcacagcgacaagcccaacgtgctgatcctgggctctggctggggcgccatcagctttctgaagcacatcgacaccaagaagtacaacgtcagcatcatcagccccagaagctacttcctgttcacccccctgctgcccagcgcccctgtgggaaccgtggacgagaagtccatcatcgagcccatcgtgaacttcgccctgaagaaaaagggcaacgtcacctactacgaggccgaggccaccagcatcaaccccgaccggaacaccgtgaccatcaagaacctgagcgccgtgtcccagctgtaccagcccgagaaccacctgggcctgcaccaggccgagcccgccgagattaagtacgactacctgatcagcgccgtgggcgccgagcccaacacctttggaatccccggcgtgaccgactacggccacttcttcaaagagatccccaacagcctggaaatccggcggaccttcgccgccaacctggaaaaggccaacctgctgcctaagggcgaccccgagcggagaaggctgctgagcatcgtggtcgtgggcggaggccccacaggcgtggaagctgctggcgagctgcaggactacgtgcaccaggacctgcggaagttcctgcccgccctggccgaggaagtgcagattcacctggtggaagccctgcccatcgtgctgaacatgttcgagaaggagctgagcagctacgcccagagccacctggaaaacacctccatcaaggtgcacctgagaaccgccgtggccaaggtggaagagaagcagctgctggccaagaccaagcacgaggacggcaagattaccgaggaaaccatcccctacggcaccctgatttgggccaccggcaacaaggccagacccgtgatcaccgacctgttcaagaagatccccgagcagaacagcagcaagcggggcctggccgtgaacgacttcctgcaggtcgagggcagcaacaacatcttcgccatcggcgacaacgcctttagcggcctgcctcctacagcccaggtggcccaccaggaagccgagtacatcgccaagaacttcgacaagatggcccagatccccaatttccagaagaacctgtcctcccggaaggataagatcgacctgctgttcgaggaaaacaacttcaagcccttcaagtacaacgacctgggcgccctggcctacctgggcagcgaaagagccattgccaccatcagaagcggcaagcggaccttctacaccggcggaggcctgatgaccttctacctgtggcagatcctgtacatgagcatgatcctgagcgcccgcagcagactgaaggtgttcttcgactggatcaagatggccttcttcaagagggacttcttcaagggcctgtga

SEQ ID NO: 527 - DNA, 1542 bp, Artificial Sequence
  source: /note="Description of Artificial Sequence: Synthetic polynucleotide"
atgctgagcaagaacctgtacagcaacaagcggctgctgaccagcaccaacaccatggtgcgcttcgccagcaccagatccaccggcgtcgaaaacagcggggctggccccaccagcttcaagaccatgaaggtcatcgacccccagcacagcgacaagcccaacgtgctgatcctgggctctggctggggcgccatcagctttctgaagcacatcgacaccaagaagtacaacgtcagcatcatcagccccagaaagtacttcctgttcacccccctgctgcccagcgcccctgtgggaaccgtggacgagaagtccatcatcgagcccatcgtgaacttcgccctgaagaaaaagggcaacgtcacctactacgaggccgaggccaccagcatcaaccccgaccggaacaccgtgaccatcaagagcctgagcgccgtgtcccagctgtaccagcccgagaaccacctgggcatgcaccaggccgagcccgccgagattaagtacgactacctgatcagcgccgtgggcgccgagcccaacacctttggaatccccggcgtgaccgactacggccacttcctggaggagatccccaacagcctggaaatccggcggaccttcgccgccaacctggaaaaggccaacctgctgcctaagggcgaccccgagcggagaaggctgctgagcatcgtggtcgtgggcggaggccccacaggcgtggaagctgctggcgagctgcaggactacgtgcaccaggacctgcggaagttcttccccgccctggccgaggaagtgcagattcacctggtggaagccctgcccatcgtgctgaacatgttcgagaagaagctgagcagctacgcccagagccacctggaaaacacctccatcaaggtgcacctgagaaccgccgtggccaaggtggaagagaagcagctgctggccaagaccaagcacgaggacggcaagattaccgaggaaaccatcccctacggcaccctgatttgggccaccggcaacaaggccagacccgtgatcaccgacctgttcaagaagatccccgagcagaacagcagcaagcggggcctggccgtgaacgacttcctgcaggtcaaaggcagcaacaacatcttcgccatcggcgacaacgcctttagcggcctgcctcctacagcccaggtggcccaccaggaagccgagtacatcgccaagaacttcgacaagatggcccagatccccaatttccagaagaacctgtcctcccggaaggataagatcgacctgctgttcgaggaaaacaacttcaagcccttcaagtacaacgacctgggcgccctggcctacctgggcagcgaaagagccattgccaccatcagaagcggcaagcggaccttctacaccggcggaggcctgatgaccttctacctgtggcggatcctgtacatgagcatgatcctgagcgcccgcagcagactgaaggtgttcttcgactggatcaagctggccttcttcaagagggacttcttcgagggcctgtga

SEQ ID NO: 528 - DNA, 1542 bp, Artificial Sequence
  source: /note="Description of Artificial Sequence: Synthetic polynucleotide"
atgctgagcaagaacctgtacagcaaccggcggctgctgaccagcaccaacaccctcgtgcgcttcgccagcaccagatccaccggcgtcgaaaacagcggggctggccccaccagcttcaagaccatgaaggtcatcgacccccagcacagcgacaagcccaacgtgctgatcctgggctctggctggggcgccatcagctttctgaagcacatcgacaccaagaagtacaacgtcagcatcatcagccccagaaagtacttcctgcacacccccctgatgcccagcgcccctgtgggaaccgtggacgagaagtccatcatcgagcccatcgtgaacttcgccctgaagaaaaagggcaacgtcacctactacgaggccgaggccaccagcatcaaccccgaccggaacaccgtgaccatcaagaacctgagcgccgtgtcccagctgtaccagcccgagaaccacctgggcctgcaccaggccgagcccgccgagattaagtacgactacctgatcagcgccgtgggcgccgagcccaacacctttggaatccccggcgtgaccgactacggccacttcttcgaggagatccccaacagcctggaaatccggcggaccttcgccgccaacctggaaaaggccaacctgctgcctaagggcgaccccgagcggagaaggctgctgagcatcgtggtcgtgggcggaggccccacaggcgtggaagctgctggcgagctgcaggactacgtgcaccaggacctgcggaagttcttccccgccctggccgaggaagtgcagattcacctggtggaagccctgcccatcgtgctgaacatgttcgagaaggagctgagcagctacgcccagagccacctggaaaacacctccatcaaggtgcacctgagaaccgccgtggccaaggtggaagagaagcagctgctggccaagaccaagcacgaggacggcaagattaccgaggaaaccatcccctacggcaccctgatttgggccaccggcaacaaggccagacccgtgatcaccgacctgttcaagaagatccccgagcagaacagcagcaagcggggcctggccgtgaacgacttcctgcaggtcaaaggcagcaacaacatcttcgccatcggcgacaacgcctttgccggcctgcctcctacagcccaggtggcccaccaggaagccgagtacctggccaagaacttcgacaagatggcccagatccccaatttccagaagaacctgtcctcccggaaggataagatcgacctgctgttcgaggaaaacaacttcaagcccttcaagtacaacgacctgggcgccctggcctacctgggcagcgaaagagccattgccaccatcagaagcggcaagcggaccttctacaccggcggaggcctgatgaccttctacctgtggcggatcctgtacatgagcatgatcctgagcgcccgcagcagactgaaggtgttcttcgactggatcaagctggccttcttcaagagggacttcttcaagggcctgtga

SEQ ID NO: 529 - DNA, 1542 bp, Artificial Sequence
  source: /note="Description of Artificial Sequence: Synthetic polynucleotide"
atgctgagcaagaacctgtacagcaacaagcggctgctgaccagcaccaacaccatggtgcgcttcgccagcaccagatccaccggcgtcgaaaacagcggggctggccccaccagcttcaagaccatgaaggtcatcgacccccagcacagcgacaagcccaacgtgctgatcctgggctctggctggggcgccatcagctttctgaagcacatcgacaccaagaagtacaacgtcagcatcatcagccccagaaagtacttcctgttcacccccctgctgcccagcgcccctgtgggaaccgtggacgagaagtccatcatcgagcccatcgtgaacttcgccctgaagaaaaagggcaacgtcacctactacgaggccgaggccaccagcatcaaccccgaccggaacaccgtgaccatcaagaacctgagcgccgtgtcccagctgtaccagcccgagaaccacctgggcatgcaccaggccgagcccgccgagattaagtacgactacctgatcagcgccgtgggcgccgagcccaacacctttggaatccccggcgtgaccgactacggccacttcttcaaagagatccccaacagcctggaaatccggcggaccttcgccgccaacctggaagaggccaacctgctgcctaagggcgaccccgagcggagaaggctgctgagcatcgtggtcgtgggcggaggccccacaggcgtggaagctgctggcgagctgcaggactacgtgcaccaggacctgcggaagttcttccccgccctggccgaggaagtgcagattcacctggtggaagccctgcccatcgtgctgaacatgttcgagaaggagctgagcagctacgcccagagccacctggaaaacacctccatcaaggtgcacctgagaaccgccgtggccaaggtggaagagaagcagctgctggccaagaccaagcacgaggacggcaagattaccgaggaaaccatcccctacggcaccctgatttgggccaccggcaacaaggccagacccgtgatcaccgacctgttcaagaagatccccgagcagaacagcagcaagcggggcctggccgtgaacgacttcctgcaggtcaaaggcagcaacaacatcttcgccatcggcgacaacgcctttgccggcctgcctcctacagcccaggtggcccaccaggaagccgagtacctggccaagaacttcgacaagatggcccagatccccaatttccagaagaacctgtcctcccggaaggataagatcgacctgctgttcgaggaaaacaacttcaagcccttcaagtacaacgacctgggcgccctggcctacctgggcagcgaaagagccattgccaccatcagaagcggcaagcggaccttctacaccggcggaggcctgatgaccttctacctgtggcggatcctgtacctgagcatgatcctgagcgcccgcagcagactgaaggtgttcttcgactggatcaagctggccttcttcaagagggacttcttcgagggcctgtga

SEQ ID NO: 530 - DNA, 1542 bp, Artificial Sequence
  source: /note="Description of Artificial Sequence: Synthetic polynucleotide"
atgctgagcaagaacctgtacagcaaccggcggctgctgaccagcaccaacaccatggtgcgcttcgccagcaccagatccaccggcgtcgaaaacagcggggctggccccaccagcttcaagaccatgaaggtcatcgacccccagcacagcgacaagcccaacgtgctgatcctgggctctggctggggcgccatcagctttctgaagcacatcgacaccaagaagtacaacgtcagcatcatcagccccagaagctacttcctgcacacccccctgctgcccagcgcccctgtgggaaccgtggacgagaagtccatcatcgagcccatcgtgaacttcgccctgaagaaaaagggcaacgtcacctactacgaggccgaggccaccagcatcaaccccgaccggaacaccgtgaccatcaagagcctgagcgccgtgtcccagctgtaccagcccgagaaccacctgggcatgcaccaggccgagcccgccgagattaagtacgactacctgatcagcgccgtgggcgccgagcccaacacctttggaatccccggcgtgaccgactacggccacttcttcgaggagatccccaacagcctggaaatccggcggaccttcgccgccaacctggaaaaggccaacctgctgcctaagggcgaccccgagcggagaaggctgctgagcatcgtggtcgtgggcggaggccccacaggcgtggaagctgctggcgagctgcaggactacgtgcaccaggacctgcggaagttcctgcccgccctggccgaggaagtgcagattcacctggtggaagccctgcccatcgtgctgaacatgttcgagaagaagctgagcagctacgcccagagccacctggaaaacacctccatcaaggtgcacctgagaaccgccgtggccaaggtggaagagaagcagctgctggccaagaccaagcacgaggacggcaagattaccgaggaaaccatcccctacggcaccctgatttgggccaccggcaacaaggccagacccgtgatcaccgacctgttcaagaagatccccgagcagaacagcagcaagcggggcctggccgtgaacgacttcctgcaggtcgagggcagcaacaacatcttcgccatcggcgacaacgcctttgccggcctgcctcctacagcccaggtggcccaccaggaagccgagtacatcgccaagaacttcgacaagatggcccagatccccaatttccagaagaacctgtcctcccggaaggataagatcgacctgctgttcgaggaaaacaacttcaagcccttcaagtacaacgacctgggcgccctggcctacctgggcagcgaaagagccattgccaccatcagaagcggcaagcggaccttctacaccggcggaggcctgatgaccttctacctgtggcagatcctgtacctgagcatgatcctgagcgcccgcagcagactgaaggtgttcttcgactggatcaagctggccttcttcaagagggacttcttcgagggcctgtga

SEQ ID NO: 531 - DNA, 1542 bp, Artificial Sequence
  source: /note="Description of Artificial Sequence: Synthetic polynucleotide"
atgctgagcaagaacctgtacagcaacaagcggctgctgaccagcaccaacaccctcgtgcgcttcgccagcaccagatccaccggcgtcgaaaacagcggggctggccccaccagcttcaagaccatgaaggtcatcgacccccagcacagcgacaagcccaacgtgctgatcctgggctctggctggggcgccatcagctttctgaagcacatcgacaccaagaagtacaacgtcagcatcatcagccccagaagctacttcctgcacacccccctgctgcccagcgcccctgtgggaaccgtggacgagaagtccatcatcgagcccatcgtgaacttcgccctgaagaaaaagggcaacgtcacctactacgaggccgaggccaccagcatcaaccccgaccggaacaccgtgaccatcaagaacctgagcgccgtgtcccagctgtaccagcccgagaaccacctgggcatgcaccaggccgagcccgccgagattaagtacgactacctgatcagcgccgtgggcgccgagcccaacacctttggaatccccggcgtgaccgactacggccacttcttcgaggagatccccaacagcctggaaatccggcggaccttcgccgccaacctggaaaaggccaacctgctgcctaagggcgaccccgagcggagaaggctgctgagcatcgtggtcgtgggcggaggccccacaggcgtggaagctgctggcgagctgcaggactacgtgcaccaggacctgcggaagttcttccccgccctggccgaggaagtgcagattcacctggtggaagccctgcccatcgtgctgaacatgttcgagaaggagctgagcagctacgcccagagccacctggaaaacacctccatcaaggtgcacctgagaaccgccgtggccaaggtggaagagaagcagctgctggccaagaccaagcacgaggacggcaagattaccgaggaaaccatcccctacggcaccctgatttgggccaccggcaacaaggccagacccgtgatcaccgacctgttcaagaagatccccgagcagaacagcagcaagcggggcctggccgtgaacgacttcctgcaggtcaaaggcagcaacaacatcttcgccatcggcgacaacgcctttgccggcctgcctcctacagcccaggtggcccaccaggaagccgagtacatcgccaagaacttcgacaagatggcccagatccccaatttccagaagaacctgtcctcccggaaggataagatcgacctgctgttcgaggaaaacaacttcaagcccttcaagtacaacgacctgggcgccctggcctacctgggcagcgaaagagccattgccaccatcagaagcggcaagcggaccttctacaccggcggaggcctgatgaccttctacctgtggcggatcctgtacatgagcatgatcctgagcgcccgcagcagactgaaggtgttcttcgactggatcaagctggccttcttcaagagggacttcttcgagggcctgtga

SEQ ID NO: 532 - DNA, 1542 bp, Artificial Sequence
  source: /note="Description of Artificial Sequence: Synthetic polynucleotide"
atgctgagcaagaacctgtacagcaacaagcggctgctgaccagcaccaacaccatggtgcgcttcgccagcaccagatccaccggcgtcgaaaacagcggggctggccccaccagcttcaagaccatgaaggtcatcgacccccagcacagcgacaagcccaacgtgctgatcctgggctctggctggggcgccatcagctttctgaagcacatcgacaccaagaagtacaacgtcagcatcatcagccccagaagctacttcctgcacacccccctgctgcccagcgcccctgtgggaaccgtggacgagaagtccatcatcgagcccatcgtgaacttcgccctgaagaaaaagggcaacgtcacctactacgaggccgaggccaccagcatcaaccccgaccggaacaccgtgaccatcaagagcctgagcgccgtgtcccagctgtaccagcccgagaaccacctgggcatgcaccaggccgagcccgccgagattaagtacgactacctgatcagcgccgtgggcgccgagcccaacacctttggaatccccggcgtgaccgactacggccacttcttcgaggagatccccaacagcctggaaatccggcggaccttcgccgccaacctggaaaaggccaacctgctgcctaagggcgaccccgagcggagaaggctgctgagcatcgtggtcgtgggcggaggccccacaggcgtggaagctgctggcgagctgcaggactacgtgcaccaggacctgcggaagttcctgcccgccctggccgaggaagtgcagattcacctggtggaagccctgcccatcgtgctgaacatgttcgagaaggagctgagcagctacgcccagagccacctggaaaacacctccatcaaggtgcacctgagaaccgccgtggccaaggtggaagagaagcagctgctggccaagaccaagcacgaggacggcaagattaccgaggaaaccatcccctacggcaccctgatttgggccaccggcaacaaggccagacccgtgatcaccgacctgttcaagaagatccccgagcagaacagcagcaagcggggcctggccgtgaacgacttcctgcaggtcaaaggcagcaacaacatcttcgccatcggcgacaacgcctttgccggcctgcctcctacagcccaggtggcccaccaggaagccgagtacatcgccaagaacttcgacaagatggcccagatccccaatttccagaagaacctgtcctcccggaaggataagatcgacctgctgttcgaggaaaacaacttcaagcccttcaagtacaacgacctgggcgccctggcctacctgggcagcgaaagagccattgccaccatcagaagcggcaagcggaccttctacaccggcggaggcctgatgaccttctacctgtggcagatcctgtacctgagcatgatcctgagcgcccgcagcagactgaaggtgttcttcgactggatcaagatggccttcttcaagagggacttcttcgagggcctgtga

SEQ ID NO: 533 - DNA, 1542 bp, Artificial Sequence
  source: /note="Description of Artificial Sequence: Synthetic polynucleotide"
atgctgagcaagaacctgtacagcaacaagcggctgctgaccagcaccaacaccatggtgcgcttcgccagcaccagatccaccggcgtcgaaaacagcggggctggccccaccagcttcaagaccatgaaggtcatcgacccccagcacagcgacaagcccaacgtgctgatcctgggctctggctggggcgccatcagctttctgaagcacatcgacaccaagaagtacaacgtcagcatcatcagccccagaaagtacttcctgcacacccccctgctgcccagcgcccctgtgggaaccgtggacgagaagtccatcatcgagcccatcgtgaacttcgccctgaagaaaaagggcaacgtcacctactacgaggccgaggccaccagcatcaaccccgaccggaacaccgtgaccatcaagaacctgagcgccgtgtcccagctgtaccagcccgagaaccacctgggcctgcaccaggccgagcccgccgagattaagtacgactacctgatcagcgccgtgggcgccgagcccaacacctttggaatccccggcgtgaccgactacggccacttcctgaaagagatccccaacagcctggaaatccggcggaccttcgccgccaacctggaaaaggccaacctgctgcctaagggcgaccccgagcggagaaggctgctgagcatcgtggtcgtgggcggaggccccacaggcgtggaagctgctggcgagctgcaggactacgtgcaccaggacctgcggaagttcttccccgccctggccgaggaagtgcagattcacctggtggaagccctgcccatcgtgctgaacatgttcgagaaggagctgagcagctacgcccagagccacctggaaaacacctccatcaaggtgcacctgagaaccgccgtggccaaggtggaagagaagcagctgctggccaagaccaagcacgaggacggcaagattaccgaggaaaccatcccctacggcaccctgatttgggccaccggcaacaaggccagacccgtgatcaccgacctgttcaagaagatccccgagcagaacagcagcaagcggggcctggccgtgaacgacttcctgcaggtcgagggcagcaacaacatcttcgccatcggcgacaacgcctttgccggcctgcctcctacagcccaggtggcccaccaggaagccgagtacatcgccaagaacttcgacaagatggcccagatccccaatttccagaagaacctgtcctcccggaaggataagatcgacctgctgttcgaggaaaacaacttcaagcccttcaagtacaacgacctgggcgccctggcctacctgggcagcgaaagagccattgccaccatcagaagcggcaagcggaccttctacaccggcggaggcctgatgaccttctacctgtggcggatcctgtacatgagcatgatcctgagcgcccgcagcagactgaaggtgttcttcgactggatcaagctggccttcttcaagagggacttcttcaagggcctgtga

SEQ ID NO: 534 - DNA, 1542 bp, Artificial Sequence
  source: /note="Description of Artificial Sequence: Synthetic polynucleotide"
atgctgagcaagaacctgtacagcaacaagcggctgctgaccagcaccaacaccatggtgcgcttcgccagcaccagatccaccggcgtcgaaaacagcggggctggccccaccagcttcaagaccatgaaggtcatcgacccccagcacagcgacaagcccaacgtgctgatcctgggctctggctggggcgccatcagctttctgaagcacatcgacaccaagaagtacaacgtcagcatcatcagccccagaagctacttcctgcacacccccctgatgcccagcgcccctgtgggaaccgtggacgagaagtccatcatcgagcccatcgtgaacttcgccctgaagaaaaagggcaacgtcacctactacgaggccgaggccaccagcatcaaccccgaccggaacaccgtgaccatcaagaacctgagcgccgtgtcccagctgtaccagcccgagaaccacctgggcctgcaccaggccgagcccgccgagattaagtacgactacctgatcagcgccgtgggcgccgagcccaacacctttggaatccccggcgtgaccgactacggccacttcttcgaggagatccccaacagcctggaaatccggcggaccttcgccgccaacctggaaaaggccaacctgctgcctaagggcgaccccgagcggagaaggctgctgagcatcgtggtcgtgggcggaggccccacaggcgtggaagctgctggcgagctgcaggactacgtgcaccaggacctgcggaagttcctgcccgccctggccgaggaagtgcagattcacctggtggaagccctgcccatcgtgctgaacatgttcgagaagaagctgagcagctacgcccagagccacctggaaaacacctccatcaaggtgcacctgagaaccgccgtggccaaggtggaagagaagcagctgctggccaagaccaagcacgaggacggcaagattaccgaggaaaccatcccctacggcaccctgatttgggccaccggcaacaaggccagacccgtgatcaccgacctgttcaagaagatccccgagcagaacagcagcaagcggggcctggccgtgaacgacttcctgcaggtcgagggcagcaacaacatcttcgccatcggcgacaacgcctttagcggcctgcctcctacagcccaggtggcccaccaggaagccgagtacatcgccaagaacttcgacaagatggcccagatccccaatttccagaagaacctgtcctcccggaaggataagatcgacctgctgttcgaggaaaacaacttcaagcccttcaagtacaacgacctgggcgccctggcctacctgggcagcgaaagagccattgccaccatcagaagcggcaagcggaccttctacaccggcggaggcctgatgaccttctacctgtggcggatcctgtacatgagcatgatcctgagcgcccgcagcagactgaaggtgttcttcgactggatcaagctggccttcttcaagagggacttcttcaagggcctgtga

SEQ ID NO: 535 - DNA, 1542 bp, Artificial Sequence
  source: /note="Description of Artificial Sequence: Synthetic polynucleotide"
atgctgagcaagaacctgtacagcaacaagcggctgctgaccagcaccaacaccctcgtgcgcttcgccagcaccagatccaccggcgtcgaaaacagcggggctggccccaccagcttcaagaccatgaaggtcatcgacccccagcacagcgacaagcccaacgtgctgatcctgggctctggctggggcgccatcagctttctgaagcacatcgacaccaagaagtacaacgtcagcatcatcagccccagaaagtacttcctgttcacccccctgatgcccagcgcccctgtgggaaccgtggacgagaagtccatcatcgagcccatcgtgaacttcgccctgaagaaaaagggcaacgtcacctactacgaggccgaggccaccagcatcaaccccgaccggaacaccgtgaccatcaagaacctgagcgccgtgtcccagctgtaccagcccgagaaccacctgggcatgcaccaggccgagcccgccgagattaagtacgactacctgatcagcgccgtgggcgccgagcccaacacctttggaatccccggcgtgaccgactacggccacttcctgaaagagatccccaacagcctggaaatccggcggaccttcgccgccaacctggaagaggccaacctgctgcctaagggcgaccccgagcggagaaggctgctgagcatcgtggtcgtgggcggaggccccacaggcgtggaagctgctggcgagctgcaggactacgtgcaccaggacctgcggaagttcctgcccgccctggccgaggaagtgcagattcacctggtggaagccctgcccatcgtgctgaacatgttcgagaaggagctgagcagctacgcccagagccacctggaaaacacctccatcaaggtgcacctgagaaccgccgtggccaaggtggaagagaagcagctgctggccaagaccaagcacgaggacggcaagattaccgaggaaaccatcccctacggcaccctgatttgggccaccggcaacaaggccagacccgtgatcaccgacctgttcaagaagatccccgagcagaacagcagcaagcggggcctggccgtgaacgacttcctgcaggtcgagggcagcaacaacatcttcgccatcggcgacaacgcctttgccggcctgcctcctacagcccaggtggcccaccaggaagccgagtacatcgccaagaacttcgacaagatggcccagatccccaatttccagaagaacctgtcctcccggaaggataagatcgacctgctgttcgaggaaaacaacttcaagcccttcaagtacaacgacctgggcgccctggcctacctgggcagcgaaagagccattgccaccatcagaagcggcaagcggaccttctacaccggcggaggcctgatgaccttctacctgtggcggatcctgtacctgagcatgatcctgagcgcccgcagcagactgaaggtgttcttcgactggatcaagatggccttcttcaagagggacttcttcgagggcctgtga

SEQ ID NO: 536 - DNA, 1542 bp, Artificial Sequence
  source: /note="Description of Artificial Sequence: Synthetic polynucleotide"
atgctgagcaagaacctgtacagcaaccggcggctgctgaccagcaccaacaccatggtgcgcttcgccagcaccagatccaccggcgtcgaaaacagcggggctggccccaccagcttcaagaccatgaaggtcatcgacccccagcacagcgacaagcccaacgtgctgatcctgggctctggctggggcgccatcagctttctgaagcacatcgacaccaagaagtacaacgtcagcatcatcagccccagaaagtacttcctgcacacccccctgctgcccagcgcccctgtgggaaccgtggacgagaagtccatcatcgagcccatcgtgaacttcgccctgaagaaaaagggcaacgtcacctactacgaggccgaggccaccagcatcaaccccgaccggaacaccgtgaccatcaagagcctgagcgccgtgtcccagctgtaccagcccgagaaccacctgggcctgcaccaggccgagcccgccgagattaagtacgactacctgatcagcgccgtgggcgccgagcccaacacctttggaatccccggcgtgaccgactacggccacttcttcgaggagatccccaacagcctggaaatccggcggaccttcgccgccaacctggaaaaggccaacctgctgcctaagggcgaccccgagcggagaaggctgctgagcatcgtggtcgtgggcggaggccccacaggcgtggaagctgctggcgagctgcaggactacgtgcaccaggacctgcggaagttcctgcccgccctggccgaggaagtgcagattcacctggtggaagccctgcccatcgtgctgaacatgttcgagaagaagctgagcagctacgcccagagccacctggaaaacacctccatcaaggtgcacctgagaaccgccgtggccaaggtggaagagaagcagctgctggccaagaccaagcacgaggacggcaagattaccgaggaaaccatcccctacggcaccctgatttgggccaccggcaacaaggccagacccgtgatcaccgacctgttcaagaagatccccgagcagaacagcagcaagcggggcctggccgtgaacgacttcctgcaggtcgagggcagcaacaacatcttcgccatcggcgacaacgcctttgccggcctgcctcctacagcccaggtggcccaccaggaagccgagtacctggccaagaacttcgacaagatggcccagatccccaatttccagaagaacctgtcctcccggaaggataagatcgacctgctgttcgaggaaaacaacttcaagcccttcaagtacaacgacctgggcgccctggcctacctgggcagcgaaagagccattgccaccatcagaagcggcaagcggaccttctacaccggcggaggcctgatgaccttctacctgtggcagatcctgtacatgagcatgatcctgagcgcccgcagcagactgaaggtgttcttcgactggatcaagctggccttcttcaagagggacttcttcaagggcctgtga

SEQ ID NO: 537 - DNA, 1542 bp, Artificial Sequence
  source: /note="Description of Artificial Sequence: Synthetic polynucleotide"
atgctgagcaagaacctgtacagcaaccggcggctgctgaccagcaccaacaccctcgtgcgcttcgccagcaccagatccaccggcgtcgaaaacagcggggctggccccaccagcttcaagaccatgaaggtcatcgacccccagcacagcgacaagcccaacgtgctgatcctgggctctggctggggcgccatcagctttctgaagcacatcgacaccaagaagtacaacgtcagcatcatcagccccagaaagtacttcctgcacacccccctgatgcccagcgcccctgtgggaaccgtggacgagaagtccatcatcgagcccatcgtgaacttcgccctgaagaaaaagggcaacgtcacctactacgaggccgaggccaccagcatcaaccccgaccggaacaccgtgaccatcaagaacctgagcgccgtgtcccagctgtaccagcccgagaaccacctgggcctgcaccaggccgagcccgccgagattaagtacgactacctgatcagcgccgtgggcgccgagcccaacacctttggaatccccggcgtgaccgactacggccacttcttcaaagagatccccaacagcctggaaatccggcggaccttcgccgccaacctggaagaggccaacctgctgcctaagggcgaccccgagcggagaaggctgctgagcatcgtggtcgtgggcggaggccccacaggcgtggaagctgctggcgagctgcaggactacgtgcaccaggacctgcggaagttcttccccgccctggccgaggaagtgcagattcacctggtggaagccctgcccatcgtgctgaacatgttcgagaagaagctgagcagctacgcccagagccacctggaaaacacctccatcaaggtgcacctgagaaccgccgtggccaaggtggaagagaagcagctgctggccaagaccaagcacgaggacggcaagattaccgaggaaaccatcccctacggcaccctgatttgggccaccggcaacaaggccagacccgtgatcaccgacctgttcaagaagatccccgagcagaacagcagcaagcggggcctggccgtgaacgacttcctgcaggtcaaaggcagcaacaacatcttcgccatcggcgacaacgcctttgccggcctgcctcctacagcccaggtggcccaccaggaagccgagtacctggccaagaacttcgacaagatggcccagatccccaatttccagaagaacctgtcctcccggaaggataagatcgacctgctgttcgaggaaaacaacttcaagcccttcaagtacaacgacctgggcgccctggcctacctgggcagcgaaagagccattgccaccatcagaagcggcaagcggaccttctacaccggcggaggcctgatgaccttctacctgtggcagatcctgtacatgagcatgatcctgagcgcccgcagcagactgaaggtgttcttcgactggatcaagctggccttcttcaagagggacttcttcaagggcctgtga

SEQ ID NO: 538 - DNA, 1542 bp, Artificial Sequence
  source: /note="Description of Artificial Sequence: Synthetic polynucleotide"
atgctgagcaagaacctgtacagcaaccggcggctgctgaccagcaccaacaccctcgtgcgcttcgccagcaccagatccaccggcgtcgaaaacagcggggctggccccaccagcttcaagaccatgaaggtcatcgacccccagcacagcgacaagcccaacgtgctgatcctgggctctggctggggcgccatcagctttctgaagcacatcgacaccaagaagtacaacgtcagcatcatcagccccagaaagtacttcctgttcacccccctgatgcccagcgcccctgtgggaaccgtggacgagaagtccatcatcgagcccatcgtgaacttcgccctgaagaaaaagggcaacgtcacctactacgaggccgaggccaccagcatcaaccccgaccggaacaccgtgaccatcaagagcctgagcgccgtgtcccagctgtaccagcccgagaaccacctgggcctgcaccaggccgagcccgccgagattaagtacgactacctgatcagcgccgtgggcgccgagcccaacacctttggaatccccggcgtgaccgactacggccacttcttcaaagagatccccaacagcctggaaatccggcggaccttcgccgccaacctggaagaggccaacctgctgcctaagggcgaccccgagcggagaaggctgctgagcatcgtggtcgtgggcggaggccccacaggcgtggaagctgctggcgagctgcaggactacgtgcaccaggacctgcggaagttcttccccgccctggccgaggaagtgcagattcacctggtggaagccctgcccatcgtgctgaacatgttcgagaaggagctgagcagctacgcccagagccacctggaaaacacctccatcaaggtgcacctgagaaccgccgtggccaaggtggaagagaagcagctgctggccaagaccaagcacgaggacggcaagattaccgaggaaaccatcccctacggcaccctgatttgggccaccggcaacaaggccagacccgtgatcaccgacctgttcaagaagatccccgagcagaacagcagcaagcggggcctggccgtgaacgacttcctgcaggtcaaaggcagcaacaacatcttcgccatcggcgacaacgcctttagcggcctgcctcctacagcccaggtggcccaccaggaagccgagtacatcgccaagaacttcgacaagatggcccagatccccaatttccagaagaacctgtcctcccggaaggataagatcgacctgctgttcgaggaaaacaacttcaagcccttcaagtacaacgacctgggcgccctggcctacctgggcagcgaaagagccattgccaccatcagaagcggcaagcggaccttctacaccggcggaggcctgatgaccttctacctgtggcggatcctgtacatgagcatgatcctgagcgcccgcagcagactgaaggtgttcttcgactggatcaagctggccttcttcaagagggacttcttcaagggcctgtga

SEQ ID NO: 539 - DNA, 1542 bp, Artificial Sequence
  source: /note="Description of Artificial Sequence: Synthetic polynucleotide"
atgctgagcaagaacctgtacagcaacaagcggctgctgaccagcaccaacaccctcgtgcgcttcgccagcaccagatccaccggcgtcgaaaacagcggggctggccccaccagcttcaagaccatgaaggtcatcgacccccagcacagcgacaagcccaacgtgctgatcctgggctctggctggggcgccatcagctttctgaagcacatcgacaccaagaagtacaacgtcagcatcatcagccccagaaagtacttcctgcacacccccctgatgcccagcgcccctgtgggaaccgtggacgagaagtccatcatcgagcccatcgtgaacttcgccctgaagaaaaagggcaacgtcacctactacgaggccgaggccaccagcatcaaccccgaccggaacaccgtgaccatcaagaacctgagcgccgtgtcccagctgtaccagcccgagaaccacctgggcctgcaccaggccgagcccgccgagattaagtacgactacctgatcagcgccgtgggcgccgagcccaacacctttggaatccccggcgtgaccgactacggccacttcctgaaagagatccccaacagcctggaaatccggcggaccttcgccgccaacctggaagaggccaacctgctgcctaagggcgaccccgagcggagaaggctgctgagcatcgtggtcgtgggcggaggccccacaggcgtggaagctgctggcgagctgcaggactacgtgcaccaggacctgcggaagttcctgcccgccctggccgaggaagtgcagattcacctggtggaagccctgcccatcgtgctgaacatgttcgagaaggagctgagcagctacgcccagagccacctggaaaacacctccatcaaggtgcacctgagaaccgccgtggccaaggtggaagagaagcagctgctggccaagaccaagcacgaggacggcaagattaccgaggaaaccatcccctacggcaccctgatttgggccaccggcaacaaggccagacccgtgatcaccgacctgttcaagaagatccccgagcagaacagcagcaagcggggcctggccgtgaacgacttcctgcaggtcgagggcagcaacaacatcttcgccatcggcgacaacgcctttgccggcctgcctcctacagcccaggtggcccaccaggaagccgagtacctggccaagaacttcgacaagatggcccagatccccaatttccagaagaacctgtcctcccggaaggataagatcgacctgctgttcgaggaaaacaacttcaagcccttcaagtacaacgacctgggcgccctggcctacctgggcagcgaaagagccattgccaccatcagaagcggcaagcggaccttctacaccggcggaggcctgatgaccttctacctgtggcggatcctgtacctgagcatgatcctgagcgcccgcagcagactgaaggtgttcttcgactggatcaagatggccttcttcaagagggacttcttcgagggcctgtga

SEQ ID NO: 540 - DNA, 1542 bp, Artificial Sequence
  source: /note="Description of Artificial Sequence: Synthetic polynucleotide"
atgctgagcaagaacctgtacagcaaccggcggctgctgaccagcaccaacaccatggtgcgcttcgccagcaccagatccaccggcgtcgaaaacagcggggctggccccaccagcttcaagaccatgaaggtcatcgacccccagcacagcgacaagcccaacgtgctgatcctgggctctggctggggcgccatcagctttctgaagcacatcgacaccaagaagtacaacgtcagcatcatcagccccagaagctacttcctgttcacccccctgatgcccagcgcccctgtgggaaccgtggacgagaagtccatcatcgagcccatcgtgaacttcgccctgaagaaaaagggcaacgtcacctactacgaggccgaggccaccagcatcaaccccgaccggaacaccgtgaccatcaagagcctgagcgccgtgtcccagctgtaccagcccgagaaccacctgggcctgcaccaggccgagcccgccgagattaagtacgactacctgatcagcgccgtgggcgccgagcccaacacctttggaatccccggcgtgaccgactacggccacttcctggaggagatccccaacagcctggaaatccggcggaccttcgccgccaacctggaaaaggccaacctgctgcctaagggcgaccccgagcggagaaggctgctgagcatcgtggtcgtgggcggaggccccacaggcgtggaagctgctggcgagctgcaggactacgtgcaccaggacctgcggaagttcctgcccgccctggccgaggaagtgcagattcacctggtggaagccctgcccatcgtgctgaacatgttcgagaaggagctgagcagctacgcccagagccacctggaaaacacctccatcaaggtgcacctgagaaccgccgtggccaaggtggaagagaagcagctgctggccaagaccaagcacgaggacggcaagattaccgaggaaaccatcccctacggcaccctgatttgggccaccggcaacaaggccagacccgtgatcaccgacctgttcaagaagatccccgagcagaacagcagcaagcggggcctggccgtgaacgacttcctgcaggtcgagggcagcaacaacatcttcgccatcggcgacaacgcctttgccggcctgcctcctacagcccaggtggcccaccaggaagccgagtacctggccaagaacttcgacaagatggcccagatccccaatttccagaagaacctgtcctcccggaaggataagatcgacctgctgttcgaggaaaacaacttcaagcccttcaagtacaacgacctgggcgccctggcctacctgggcagcgaaagagccattgccaccatcagaagcggcaagcggaccttctacaccggcggaggcctgatgaccttctacctgtggcagatcctgtacatgagcatgatcctgagcgcccgcagcagactgaaggtgttcttcgactggatcaagatggccttcttcaagagggacttcttcgagggcctgtga

SEQ ID NO: 541 - DNA, 1542 bp, Artificial Sequence
  source: /note="Description of Artificial Sequence: Synthetic polynucleotide"
atgctgagcaagaacctgtacagcaaccggcggctgctgaccagcaccaacaccatggtgcgcttcgccagcaccagatccaccggcgtcgaaaacagcggggctggccccaccagcttcaagaccatgaaggtcatcgacccccagcacagcgacaagcccaacgtgctgatcctgggctctggctggggcgccatcagctttctgaagcacatcgacaccaagaagtacaacgtcagcatcatcagccccagaaagtacttcctgttcacccccctgctgcccagcgcccctgtgggaaccgtggacgagaagtccatcatcgagcccatcgtgaacttcgccctgaagaaaaagggcaacgtcacctactacgaggccgaggccaccagcatcaaccccgaccggaacaccgtgaccatcaagaacctgagcgccgtgtcccagctgtaccagcccgagaaccacctgggcctgcaccaggccgagcccgccgagattaagtacgactacctgatcagcgccgtgggcgccgagcccaacacctttggaatccccggcgtgaccgactacggccacttcttcaaagagatccccaacagcctggaaatccggcggaccttcgccgccaacctggaaaaggccaacctgctgcctaagggcgaccccgagcggagaaggctgctgagcatcgtggtcgtgggcggaggccccacaggcgtggaagctgctggcgagctgcaggactacgtgcaccaggacctgcggaagttcttccccgccctggccgaggaagtgcagattcacctggtggaagccctgcccatcgtgctgaacatgttcgagaagaagctgagcagctacgcccagagccacctggaaaacacctccatcaaggtgcacctgagaaccgccgtggccaaggtggaagagaagcagctgctggccaagaccaagcacgaggacggcaagattaccgaggaaaccatcccctacggcaccctgatttgggccaccggcaacaaggccagacccgtgatcaccgacctgttcaagaagatccccgagcagaacagcagcaagcggggcctggccgtgaacgacttcctgcaggtcaaaggcagcaacaacatcttcgccatcggcgacaacgcctttgccggcctgcctcctacagcccaggtggcccaccaggaagccgagtacctggccaagaacttcgacaagatggcccagatccccaatttccagaagaacctgtcctcccggaaggataagatcgacctgctgttcgaggaaaacaacttcaagcccttcaagtacaacgacctgggcgccctggcctacctgggcagcgaaagagccattgccaccatcagaagcggcaagcggaccttctacaccggcggaggcctgatgaccttctacctgtggcggatcctgtacatgagcatgatcctgagcgcccgcagcagactgaaggtgttcttcgactggatcaagatggccttcttcaagagggacttcttcgagggcctgtga

SEQ ID NO: 542 - protein, 513 aa, Saccharomyces cerevisiae
MLSKNLYSNKRLLTSTNTLVRFASTRSTGVENSGAGPTSFKTMKVIDPQHSDKPNVLILGSGWGAISFLKHIDTKKYNVSIISPRSYFLFTPLLPSAPVGTVDEKSIIEPIVNFALKKKGNVTYYEAEATSINPDRNTVTIKSLSAVSQLYQPENHLGLHQAEPAEIKYDYLISAVGAEPNTFGIPGVTDYGHFLKEIPNSLEIRRTFAANLEKANLLPKGDPERRRLLSIVVVGGGPTGVEAAGELQDYVHQDLRKFLPALAEEVQIHLVEALPIVLNMFEKKLSSYAQSHLENTSIKVHLRTAVAKVEEKQLLAKTKHEDGKITEETIPYGTLIWATGNKARPVITDLFKKIPEQNSSKRGLAVNDFLQVKGSNNIFAIGDNAFAGLPPTAQVAHQEAEYLAKNFDKMAQIPNFQKNLSSRKDKIDLLFEENNFKPFKYNDLGALAYLGSERAIATIRSGKRTFYTGGGLMTFYLWRILYLSMILSARSRLKVFFDWIKLAFFKRDFFKGL

SEQ ID NO: 543 - DNA, 24 bp, Artificial Sequence
  source: /note="Description of Artificial Sequence: Synthetic forward primer"
ttctcgaggtagggtgtcagtttc

SEQ ID NO: 544 - DNA, 29 bp, Artificial Sequence
  source: /note="Description of Artificial Sequence: Synthetic reverse primer"
aaagcggccgcagtgatcaaccaatcttg

SEQ ID NO: 545 - DNA, 20 bp, Artificial Sequence
  source: /note="Description of Artificial Sequence: Synthetic NDI1 forward primer"
caccagttgggacagtagac

SEQ ID NO: 546 - DNA, 20 bp, Artificial Sequence
  source: /note="Description of Artificial Sequence: Synthetic NDI1 reverse primer"
cctcatagtaggtaacgttc

SEQ ID NO: 547 - DNA, 1542 bp, Artificial Sequence
  source: /note="Description of Artificial Sequence: Synthetic polynucleotide"
atgctatcgaagaatttgtatagtaacaagaggttgctcacctcgacgaatacgctagtcagattcgcttccaccagatccacaggggtggaaaactccggagcaggtcctacatcttttaagaccatgaaagtcattgaccctcagcacagcgacaaaccaaacgtgctgatactgggttcggggtggggagctatttcgtttttaaagcacattgacaccaagaagtacaacgtttccatcgtgtctcctagaagctatttcttatttacgcctttgttaccttctgcaccagttgggacagtagacgaaaagtcaattattgagcccatcgttaattttgctctcaagaaaaaggggaacgttacctactatgaggcagaagccacctctatcaatcccgacaggaataccgttaccataaaatcattatctgccgttagccagctataccaacctgaaaaccatctagggctgcatcaagcagaacctgctgaaattaagtacgattatttaatcagtgctgtaggtgcggaacctaacacatttggtattcctggggtcactgattacggtcatttcctgaaggaaattcccaactctttggaaataagaagaacttttgccgccaatctagagaaggctaacttattgccaaagggtgatcccgaaagaagaagactactgtccattgtcgtggttggtggtgggcctactggtgtagaggccgctggtgaactacaggattatgttcaccaggacctgagaaagtttctccctgcattggccgaagaagtccaaattcacttggtcgaagctctgcccatcgttttgaatatgtttgagaaaaagctttcatcatacgcgcaatcacatttagaaaacacttcgatcaaagtacatctgagaacggctgtcgccaaagttgaagaaaagcaattgttggcaaagacgaaacacgaagacggtaaaataaccgaagaaactattccatacggtactttgatttgggccacgggtaacaaggcaagaccggtaatcacagaccttttcaagaaaattcctgagcaaaactcgtccaagagaggattggcagtgaatgactttttgcaagtgaaaggcagcaacaacattttcgccattggtgacaatgcatttgctgggttgccaccaaccgcccaagtggcgcaccaagaggccgaatatttggccaagaattttgataaaatggctcaaataccaaatttccaaaagaatctatcttcaagaaaggataaaattgatctcttgttcgaggagaacaactttaaacctttcaaatacaacgatttaggtgccttagcatacctgggatccgaaagggccattgcaaccatacgttccggtaagagaacattttacaccggtggtggcttaatgaccttctacttatggagaattttgtacttgtccatgattctatctgcaagatcgagattaaaggtctttttcgactggattaaattagcatttttcaaaagagacttttttaaaggattatag

SEQ ID NO: 548 - DNA, 1542 bp, Artificial Sequence
  source: /note="Description of Artificial Sequence: Synthetic polynucleotide"
atgctatcgaagaatttgtatagtaacaagaggttgctcacctcgacgaatacgctagtcagattcgcttccaccagatccacaggggtggaaaactccggagcaggtcctacatcttttaagaccatgaaagtcattgaccctcagcacagcgacaaaccaaacgtgctgatactgggttcggggtggggagctatttcgtttttaaagcacattgacaccaagaagtacaacgtttccatcatctctcctagaagctatttcttatacacgcctttgttaccttctgcaccagttgggacagtagacgaaaagtcaattattgagcccatcgttaattttgctctcaagaaaaaggggaacgttacctactatgaggcagaagccacctctatcaatcccgacaggaataccgttaccataaaatcattatctgccgttagccagctataccaacctgaaaaccatctagggctgcatcaagcagaacctgctgaaattaagtacgattatttaatcagtgctgtaggtgcggaacctaacacatttggtattcctggggtcactgattacggtcatttcctgaaggaaattcccaactctttggaaataagaagaacttttgccgccaatctagagaaggctaacttattgccaaagggtgatcccgaaagaagaagactactgtccattgtcgtggttggtggtgggcctactggtgtagaggccgctggtgaactacaggattatgttcaccaggacctgagaaagtttctccctgcattggccgaagaagtccaaattcacttggtcgaagctctgcccatcgttttgaatatgtttgagaaaaagctttcatcatacgcgcaatcacatttagaaaacacttcgatcaaagtacatctgagaacggctgtcgccaaagttgaagaaaagcaattgttggcaaagacgaaacacgaagacggtaaaataaccgaagaaactattccatacggtactttgatttgggccacgggtaacaaggcaagaccggtaatcacagaccttttcaagaaaattcctgagcaaaactcgtccaagagaggattggcagtgaatgactttttgcaagtgaaaggcagcaacaacattttcgccattggtgacaatgcatttgctgggttgccaccaaccgcccaagtggcgcaccaagaggccgaatatttggccaagaattttgataaaatggctcaaataccaaatttccaaaagaatctatcttcaagaaaggataaaattgatctcttgttcgaggagaacaactttaaacctttcaaatacaacgatttaggtgccttagcatacctgggatccgaaagggccattgcaaccatacgttccggtaagagaacattttacaccggtggtggcttaatgaccttctacttatggagaattttgtacttgtccatgattctatctgcaagatcgagattaaaggtctttttcgactggattaaattagcatttttcaaaagagacttttttaaaggattatag

SEQ ID NO: 549 - DNA, 1542 bp, Artificial Sequence
  source: /note="Description of Artificial Sequence: Synthetic polynucleotide"
atgctatcgaagaatttgtatagtaacaagaggttgctcacctcgacgaatacgctagtcagattcgcttccaccagatccacaggggtggaaaactccggagcaggtcctacatcttttaagaccatgaaagtcattgaccctcagcacagcgacaaaccaaacgtgctgatactgggttcggggtggggagctatttcgtttttaaagcacattgacaccaagaagtacaacgtttccatcatctctcctagaagctatttcatctttacgcctttgttaccttctgcaccagttgggacagtagacgaaaagtcaattattgagcccatcgttaattttgctctcaagaaaaaggggaacgttacctactatgaggcagaagccacctctatcaatcccgacaggaataccgttaccataaaatcattatctgccgttagccagctataccaacctgaaaaccatctagggctgcatcaagcagaacctgctgaaattaagtacgattatttaatcagtgctgtaggtgcggaacctaacacatttggtattcctggggtcactgattacggtcatttcctgaaggaaattcccaactctttggaaataagaagaacttttgccgccaatctagagaaggctaacttattgccaaagggtgatcccgaaagaagaagactactgtccattgtcgtggttggtggtgggcctactggtgtagaggccgctggtgaactacaggattatgttcaccaggacctgagaaagtttctccctgcattggccgaagaagtccaaattcacttggtcgaagctctgcccatcgttttgaatatgtttgagaaaaagctttcatcatacgcgcaatcacatttagaaaacacttcgatcaaagtacatctgagaacggctgtcgccaaagttgaagaaaagcaattgttggcaaagacgaaacacgaagacggtaaaataaccgaagaaactattccatacggtactttgatttgggccacgggtaacaaggcaagaccggtaatcacagaccttttcaagaaaattcctgagcaaaactcgtccaagagaggattggcagtgaatgactttttgcaagtgaaaggcagcaacaacattttcgccattggtgacaatgcatttgctgggttgccaccaaccgcccaagtggcgcaccaagaggccgaatatttggccaagaattttgataaaatggctcaaataccaaatttccaaaagaatctatcttcaagaaaggataaaattgatctcttgttcgaggagaacaactttaaacctttcaaatacaacgatttaggtgccttagcatacctgggatccgaaagggccattgcaaccatacgttccggtaagagaacattttacaccggtggtggcttaatgaccttctacttatggagaattttgtacttgtccatgattctatctgcaagatcgagattaaaggtctttttcgactggattaaattagcatttttcaaaagagacttttttaaaggattatag

SEQ ID NO: 550 - DNA, 1542 bp, Artificial Sequence
  source: /note="Description of Artificial Sequence: Synthetic polynucleotide"
atgctatcgaagaatttgtatagtaacaagaggttgctcacctcgacgaatacgctagtcagattcgcttccaccagatccacaggggtggaaaactccggagcaggtcctacatcttttaagaccatgaaagtcattgaccctcagcacagcgacaaaccaaacgtgctgatactgggttcggggtggggagctatttcgtttttaaagcacattgacaccaagaagtacaacgtttccatcatctctcctagaagctatttcttatttacgcctttgttaccttctgcaccagttgggacagtagacgaaaagtcaattattgagcccatcgttaattttgctctcaagaaaaaggggaacgttacctactatgaggcagaagccacctctatcaatcccgacaggaataccgttaccataaaatcattatctgccgttagccagctataccaacctgaaaaccatctagggctgcatcaagcagaacctgctgaaattaagtacgattatttaatcagtgctgtaggtgcggaacctaacacatttggtattcctggggtcactgattacggtcatttcctgaaggaaattcccaactctttggaaataagaagaacttttgccgccaatctagagaaggctaacttattgccaaagggtgatcccgaaagaagaagactactgtccattgtcgtggttggtggtgggcctactggtgtagaggccgctggtgaactacaggattatgttcaccaggacctgagaaagtttctccctgcattggccgaagaaatccaaattcacttggtcgaagctctgcccatcgttttgaatatgtttgagaaaaagctttcatcatacgcgcaatcacatttagaaaacacttcgatcaaagtacatctgagaacggctgtcgccaaagttgaagaaaagcaattgttggcaaagacgaaacacgaagacggtaaaataaccgaagaaactattccatacggtactttgatttgggccacgggtaacaaggcaagaccggtaatcacagaccttttcaagaaaattcctgagcaaaactcgtccaagagaggattggcagtgaatgactttttgcaagtgaaaggcagcaacaacattttcgccattggtgacaatgcatttgctgggttgccaccaaccgcccaagtggcgcaccaagaggccgaatatttggccaagaattttgataaaatggctcaaataccaaatttccaaaagaatctatcttcaagaaaggataaaattgatctcttgttcgaggagaacaactttaaacctttcaaatacaacgatttaggtgccttagcatacctgggatccgaaagggccattgcaaccatacgttccggtaagagaacattttacaccggtggtggcttaatgaccttctacttatggagaattttgtacttgtccatgattctatctgcaagatcgagattaaaggtctttttcgactggattaaattagcatttttcaaaagagacttttttaaaggattatag

SEQ ID NO: 551 - DNA, 1542 bp, Artificial Sequence
  source: /note="Description of Artificial Sequence: Synthetic polynucleotide"
atgctatcgaagaatttgtatagtaacaagaggttgctcacctcgacgaatacgctagtcagattcgcttccaccagatccacaggggtggaaaactccggagcaggtcctacatcttttaagaccatgaaagtcattgaccctcagcacagcgacaaaccaaacgtgctgatactgggttcggggtggggagctatttcgtttttaaagcacattgacaccaagaagtacaacgtttccatcatctctcctagaagctatttcttatttacgcctttgttaccttctgcaccagttgggacagtagacgaaaagtcaattattgagcccatcgttaattttgctctcaagaaaaaggggaacgttacctactatgaggcagaagccacctctatcaatcccgacaggaataccgttaccataaaatcattatctgccgttagccagctataccaacctgaaaaccatctagggctgcatcaagcagaacctgctgaaattaagtacgattatttaatcagtgctgtaggtgcggaacctaacacatttggtattcctggggtcactgattacggtcatttcctgaaggaaattcccaactctttggaaataagaagaacttttgccgccaatctagaggaggctaacttattgccaaagggtgatcccgaaagaagaagactactgtccattgtcgtggttggtggtgggcctactggtgtagaggccgctggtgaactacaggattatgttcaccaggacctgagaaagtttctccctgcattggccgaagaagtccaaattcacttggtcgaagctctgcccatcgttttgaatatgtttgagaaaaagctttcatcatacgcgcaatcacatttagaaaacacttcgatcaaagtacatctgagaacggctgtcgccaaagttgaagaaaagcaattgttggcaaagacgaaacacgaagacggtaaaataaccgaagaaactattccatacggtactttgatttgggccacgggtaacaaggcaagaccggtaatcacagaccttttcaagaaaattcctgagcaaaactcgtccaagagaggattggcagtgaatgactttttgcaagtgaaaggcagcaacaacattttcgccattggtgacaatgcatttgctgggttgccaccaaccgcccaagtggcgcaccaagaggccgaatatttggccaagaattttgataaaatggctcaaataccaaatttccaaaagaatctatcttcaagaaaggataaaattgatctcttgttcgaggagaacaactttaaacctttcaaatacaacgatttaggtgccttagcatacctgggatccgaaagggccattgcaaccatacgttccggtaagagaacattttacaccggtggtggcttaatgaccttctacttatggagaattttgtacttgtccatgattctatctgcaagatcgagattaaaggtctttttcgactggattaaattagcatttttcaaaagagacttttttaaaggattatag

SEQ ID NO: 552 - DNA, 1542 bp, Artificial Sequence
  source: /note="Description of Artificial Sequence: Synthetic polynucleotide"
atgctatcgaagaatttgtatagtaacaagaggttgctcacctcgacgaatacgctagtcagattcgcttccaccagatccacaggggtggaaaactccggagcaggtcctacatcttttaagaccatgaaagtcattgaccctcagcacagcgacaaaccaaacgtgctgatactgggttcggggtggggagctatttcgtttttaaagcacattgacaccaagaagtacaacgtttccatcatctctcctagaagctatttcttatttacgcctttgttaccttctgcaccagttgggacagtagacgaaaagtcaattattgagcccatcgttaattttgctctcaagaaaaaggggaacgttacctactatgaggcagaagccacctctatcaatcccgacaggaataccgttaccataaaatcattatctgccgttagccagctataccaacctgaaaaccatctagggctgcatcaagcagaacctgctgaaattaagtacgattatttaatcagtgctgtaggtgcggaacctaacacatttggtattcctggggtcactgattacggtcatttcctgaaggaaattcccaactctttggaaataagaagaacttttgccgccaatctagagaaggctaacttattgccaaagggtgatcccgaaagaagaagactactgtccattgtcgtggttggtggtgggcctactggtgtagaggccgctggtgaactacaggattatgttcaccaggacctgagaaagtttctccctgcattggccgaagaagtccaaattcacttggtcgaagctctgcccatcgttttgaatatgtttgagaaaaagctttcatcatacgcgcaatcacatttagaaaacacttcgatcaaagtacatctgagaacggctgtcgccaaagttgaagaaaagcaattgttggcaaagacgaaacacgaagacggtaaaataaccgaagaaactattccatacggtactttgatttgggccacgggtaacaaggcaagaccggtaatcacagaccttttcaagaaaattcctgagcaaaactcgtccaagagaggattggcagtgaatgactttttgcaagtgaaaggcagcaacaacattttcgccattggtgacaatgcatttgctgggttgccaccaaccgcccaagtggcgcaccaagaggccgaatatttggccaagaattttgataaaatggctcaaataccaaatttccaaaagaatctatcttcaagaaaggataaaattgatctcttgttcgaggagaacaactttaaacctttcaaatacaacgatttaggtgccttagcatacctgggatccgaaagggccattgcaaccatacgttccggtaagagaacattttacaccggtggtggcttaatgaccttctacttatggagaattatctacttgtccatgattctatctgcaagatcgagattaaaggtctttttcgactggattaaattagcatttttcaaaagagacttttttaaaggattatag

SEQ ID NO: 553 - DNA, 1542 bp, Artificial Sequence
  source: /note="Description of Artificial Sequence: Synthetic polynucleotide"
atgctatcgaagaatttgtatagtaacaagaggttgctcacctcgacgaatacgctagtcagattcgcttccaccagatccacaggggtggaaaactccggagcaggtcctacatcttttaagaccatgaaagtcattgaccctcagcacagcgacaaaccaaacgtgctgatactgggttcggggtggggagctatttcgtttttaaagcacattgacaccaagaagtacaacgtttccatcatctctcctagaagctatttcttatttacgcctttgttaccttctgcaccagttgggacagtagacgaaaagtcaattattgagcccatcgttaattttgctctcaagaaaaaggggaacgttacctactatgaggcagaagccacctctatcaatcccgacaggaataccgttaccataaaatcattatctgccgttagccagctataccaacctgaaaaccatctagggctgcatcaagcagaacctgctgaaattaagtacgattatttaatcagtgctgtaggtgcggaacctaacacatttggtattcctggggtcactgattacggtcatttcctgaaggaaattcccaactctatggaaataagaagaacttttgccgccaatctagagaaggctaacttattgccaaagggtgatcccgaaagaagaagactactgtccattgtcgtggttggtggtgggcctactggtgtagaggccgctggtgaactacaggattatgttcaccaggacctgagaaagtttctccctgcattggccgaagaagtccaaattcacttggtcgaagctctgcccatcgttttgaatatgtttgagaaaaagctttcatcatacgcgcaatcacatttagaaaacacttcgatcaaagtacatctgagaacggctgtcgccaaagttgaagaaaagcaattgttggcaaagacgaaacacgaagacggtaaaataaccgaagaaactattccatacggtactttgatttgggccacgggtaacaaggcaagaccggtaatcacagaccttttcaagaaaattcctgagcaaaactcgtccaagagaggattggcagtgaatgactttttgcaagtgaaaggcagcaacaacattttcgccattggtgacaatgcatttgctgggttgccaccaaccgcccaagtggcgcaccaagaggccgaatatttggccaagaattttgataaaatggctcaaataccaaatttccaaaagaatctatcttcaagaaaggataaaattgatctcttgttcgaggagaacaactttaaacctttcaaatacaacgatttaggtgccttagcatacctgggatccgaaagggccattgcaaccatacgttccggtaagagaacattttacaccggtggtggcttaatgaccttctacttatggagaattttgtacttgtccatgattctatctgcaagatcgagattaaaggtctttttcgactggattaaattagcatttttcaaaagagacttttttaaaggattatag

SEQ ID NO: 554 - DNA, 1542 bp, Artificial Sequence
  source: /note="Description of Artificial Sequence: Synthetic polynucleotide"
atgctatcgaagaatttgtatagtaacaagaggttgctcacctcgacgaatacgctagtcagattcgcttccaccagatccacaggggtggaaaactccggagcaggtcctacatcttttaagaccatgaaagtcattgaccctcagcacagcgacaaaccaaacgtgctgatactgggttcggggtggggagctatttcgtttttaaagcacattgacaccaagaagtacaacgtttccatcatctctcctagaagctatttcttatttacgcctttgttaccttctgcaccagttgggacagtagacgaaaagtcaattattgagcccatcgttaattttgctctcaagaaaaaggggaacgttacctactatgaggcagaagccacctctatcaatcccgacaggaataccgttaccataaaatcattatctgccgttagccagctataccaacctgaaaaccatctagggctgcatcaagcagaacctgctgaaattaagtacgattatttaatcagtgctgtaggtgcggaacctaacacatttggtattcctggggtcactgattacggtcatttcctgaaggaaattcccaactctttggaaataagaagaacttttgccgccaatctagagaaggctaacttattgccaaagggtgatcccgaaagaagaagactactgtccattgtcgtggttggtggtgggcctactggtgtagaggccgctggtgaactacaggattatgttcaccaggacctgagaaagtttgtgcctgcattggccgaagaagtccaaattcacttggtcgaagctctgcccatcgttttgaatatgtttgagaaaaagctttcatcatacgcgcaatcacatttagaaaacacttcgatcaaagtacatctgagaacggctgtcgccaaagttgaagaaaagcaattgttggcaaagacgaaacacgaagacggtaaaataaccgaagaaactattccatacggtactttgatttgggccacgggtaacaaggcaagaccggtaatcacagaccttttcaagaaaattcctgagcaaaactcgtccaagagaggattggcagtgaatgactttttgcaagtgaaaggcagcaacaacattttcgccattggtgacaatgcatttgctgggttgccaccaaccgcccaagtggcgcaccaagaggccgaatatttggccaagaattttgataaaatggctcaaataccaaatttccaaaagaatctatcttcaagaaaggataaaattgatctcttgttcgaggagaacaactttaaacctttcaaatacaacgatttaggtgccttagcatacctgggatccgaaagggccattgcaaccatacgttccggtaagagaacattttacaccggtggtggcttaatgaccttctacttatggagaattttgtacttgtccatgattctatctgcaagatcgagattaaaggtctttttcgactggattaaattagcatttttcaaaagagacttttttaaaggattatag

SEQ ID NO: 555 - DNA, 1542 bp, Artificial Sequence
  source: /note="Description of Artificial Sequence: Synthetic polynucleotide"
atgctatcgaagaatttgtatagtaacaagaggttgctcacctcgacgaatacgctagtcagattcgcttccaccagatccacaggggtggaaaactccggagcaggtcctacatcttttaagaccatgaaagtcattgaccctcagcacagcgacaaaccaaacgtgctgatactgggttcggggtggggagctatttcgtttttaaagcacattgacaccaagaagtacaacgtttccatcatctctcctagaagctatttcttatttacgcctttgttaccttctgcaccagttgggacagtagacgaaaagtcaattattgagcccatcgttaattttgctctcaagaaaaaggggaacgttacctactatgaggcagaagccacctctatcaatcccgacaggaataccgttaccataaaatcattatctgccgttagccagctataccaacctgaaaaccatctagggctgcatcaagcagaacctgctgaaattaagtacgattatttaatcagtgctgtaggtgcggaacctaacacatttggtattcctggggtcactgattacggtcatttcatcaaggaaattcccaactctttggaaataagaagaacttttgccgccaatctagagaaggctaacttattgccaaagggtgatcccgaaagaagaagactactgtccattgtcgtggttggtggtgggcctactggtgtagaggccgctggtgaactacaggattatgttcaccaggacctgagaaagtttctccctgcattggccgaagaagtccaaattcacttggtcgaagctctgcccatcgttttgaatatgtttgagaaaaagctttcatcatacgcgcaatcacatttagaaaacacttcgatcaaagtacatctgagaacggctgtcgccaaagttgaagaaaagcaattgttggcaaagacgaaacacgaagacggtaaaataaccgaagaaactattccatacggtactttgatttgggccacgggtaacaaggcaagaccggtaatcacagaccttttcaagaaaattcctgagcaaaactcgtccaagagaggattggcagtgaatgactttttgcaagtgaaaggcagcaacaacattttcgccattggtgacaatgcatttgctgggttgccaccaaccgcccaagtggcgcaccaagaggccgaatatttggccaagaattttgataaaatggctcaaataccaaatttccaaaagaatctatcttcaagaaaggataaaattgatctcttgttcgaggagaacaactttaaacctttcaaatacaacgatttaggtgccttagcatacctgggatccgaaagggccattgcaaccatacgttccggtaagagaacattttacaccggtggtggcttaatgaccttctacttatggagaattttgtacttgtccatgattctatctgcaagatcgagattaaaggtctttttcgactggattaaattagcatttttcaaaagagacttttttaaaggattatag

SEQ ID NO: 556 - DNA, 1542 bp, Artificial Sequence
  source: /note="Description of Artificial Sequence: Synthetic polynucleotide"
atgctatcgaagaatttgtatagtaacaagaggttgctcacctcgacgaatacgctagtcagattcgcttccaccagatccacaggggtggaaaactccggagcaggtcctacatcttttaagaccatgaaagtcattgaccctcagcacagcgacaaaccaaacgtgctgatactgggttcggggtggggagctatttcgtttttaaagcacattgacaccaagaagtacaacgtttccgtgatctctcctagaagctatttcttatttacgcctttgttaccttctgcaccagttgggacagtagacgaaaagtcaattattgagcccatcgttaattttgctctcaagaaaaaggggaacgttacctactatgaggcagaagccacctctatcaatcccgacaggaataccgttaccataaaatcattatctgccgttagccagctataccaacctgaaaaccatctagggctgcatcaagcagaacctgctgaaattaagtacgattatttaatcagtgctgtaggtgcggaacctaacacatttggtattcctggggtcactgattacggtcatttcctgaaggaaattcccaactctttggaaataagaagaacttttgccgccaatctagagaaggctaacttattgccaaagggtgatcccgaaagaagaagactactgtccattgtcgtggttggtggtgggcctactggtgtagaggccgctggtgaactacaggattatgttcaccaggacctgagaaagtttctccctgcattggccgaagaagtccaaattcacttggtcgaagctctgcccatcgttttgaatatgtttgagaaaaagctttcatcatacgcgcaatcacatttagaaaacacttcgatcaaagtacatctgagaacggctgtcgccaaagttgaagaaaagcaattgttggcaaagacgaaacacgaagacggtaaaataaccgaagaaactattccatacggtactttgatttgggccacgggtaacaaggcaagaccggtaatcacagaccttttcaagaaaattcctgagcaaaactcgtccaagagaggattggcagtgaatgactttttgcaagtgaaaggcagcaacaacattttcgccattggtgacaatgcatttgctgggttgccaccaaccgcccaagtggcgcaccaagaggccgaatatttggccaagaattttgataaaatggctcaaataccaaatttccaaaagaatctatcttcaagaaaggataaaattgatctcttgttcgaggagaacaactttaaacctttcaaatacaacgatttaggtgccttagcatacctgggatccgaaagggccattgcaaccatacgttccggtaagagaacattttacaccggtggtggcttaatgaccttctacttatggagaattttgtacttgtccatgattctatctgcaagatcgagattaaaggtctttttcgactggattaaattagcatttttcaaaagagacttttttaaaggattatag

SEQ ID NO: 557 - DNA, 1542 bp, Artificial Sequence
  source: /note="Description of Artificial Sequence: Synthetic polynucleotide"
atgctatcgaagaatttgtatagtaacaagaggttgctcacctcgacgaatacgctagtcagattcgcttccaccagatccacaggggtggaaaactccggagcaggtcctacatcttttaagaccatgaaagtcattgaccctcagcacagcgacaaaccaaacgtgctgatactgggttcggggtggggagctatttcgtttttaaagcacattgacaccaagaagtacaacgtttccatcatctctcctagaagctatttcttatttacgcctttgttaccttctgcaccagttgggacagtagacgaaaagtcaattattgagcccatcgttaattttgctctcaagaaaaaggggaacgttacctactatgaggcagaagccacctctatcaatcccgacaggaataccgttaccataaaatcattatctgccgttagccagatgtaccaacctgaaaaccatctagggctgcatcaagcagaacctgctgaaattaagtacgattatttaatcagtgctgtaggtgcggaacctaacacatttggtattcctggggtcactgattacggtcatttcctgaaggaaattcccaactctttggaaataagaagaacttttgccgccaatctagagaaggctaacttattgccaaagggtgatcccgaaagaagaagactactgtccattgtcgtggttggtggtgggcctactggtgtagaggccgctggtgaactacaggattatgttcaccaggacctgagaaagtttctccctgcattggccgaagaagtccaaattcacttggtcgaagctctgcccatcgttttgaatatgtttgagaaaaagctttcatcatacgcgcaatcacatttagaaaacacttcgatcaaagtacatctgagaacggctgtcgccaaagttgaagaaaagcaattgttggcaaagacgaaacacgaagacggtaaaataaccgaagaaactattccatacggtactttgatttgggccacgggtaacaaggcaagaccggtaatcacagaccttttcaagaaaattcctgagcaaaactcgtccaagagaggattggcagtgaatgactttttgcaagtgaaaggcagcaacaacattttcgccattggtgacaatgcatttgctgggttgccaccaaccgcccaagtggcgcaccaagaggccgaatatttggccaagaattttgataaaatggctcaaataccaaatttccaaaagaatctatcttcaagaaaggataaaattgatctcttgttcgaggagaacaactttaaacctttcaaatacaacgatttaggtgccttagcatacctgggatccgaaagggccattgcaaccatacgttccggtaagagaacattttacaccggtggtggcttaatgaccttctacttatggagaattttgtacttgtccatgattctatctgcaagatcgagattaaaggtctttttcgactggattaaattagcatttttcaaaagagacttttttaaaggattatag

SEQ ID NO: 558 - DNA, 1542 bp, Artificial Sequence
  source: /note="Description of Artificial Sequence: Synthetic polynucleotide"
atgctatcgaagaatttgtatagtaacaagaggttgctcacctcgacgaatacgctagtcagattcgcttccaccagatccacaggggtggaaaactccggagcaggtcctacatcttttaagaccatgaaagtcattgaccctcagcacagcgacaaaccaaacgtgctgatactgggttcggggtggggagctatttcgtttttaaagcacattgacaccaagaagtacaacgtttccatcatctctcctaagagctatttcttatttacgcctttgttaccttctgcaccagttgggacagtagacgaaaagtcaattattgagcccatcgttaattttgctctcaagaaaaaggggaacgttacctactatgaggcagaagccacctctatcaatcccgacaggaataccgttaccataaaatcattatctgccgttagccagctataccaacctgaaaaccatctagggctgcatcaagcagaacctgctgaaattaagtacgattatttaatcagtgctgtaggtgcggaacctaacacatttggtattcctggggtcactgattacggtcatttcctgaaggaaattcccaactctttggaaataagaagaacttttgccgccaatctagagaaggctaacttattgccaaagggtgatcccgaaagaagaagactactgtccattgtcgtggttggtggtgggcctactggtgtagaggccgctggtgaactacaggattatgttcaccaggacctgagaaagtttctccctgcattggccgaagaagtccaaattcacttggtcgaagctctgcccatcgttttgaatatgtttgagaaaaagctttcatcatacgcgcaatcacatttagaaaacacttcgatcaaagtacatctgagaacggctgtcgccaaagttgaagaaaagcaattgttggcaaagacgaaacacgaagacggtaaaataaccgaagaaactattccatacggtactttgatttgggccacgggtaacaaggcaagaccggtaatcacagaccttttcaagaaaattcctgagcaaaactcgtccaagagaggattggcagtgaatgactttttgcaagtgaaaggcagcaacaacattttcgccattggtgacaatgcatttgctgggttgccaccaaccgcccaagtggcgcaccaagaggccgaatatttggccaagaattttgataaaatggctcaaataccaaatttccaaaagaatctatcttcaagaaaggataaaattgatctcttgttcgaggagaacaactttaaacctttcaaatacaacgatttaggtgccttagcatacctgggatccgaaagggccattgcaaccatacgttccggtaagagaacattttacaccggtggtggcttaatgaccttctacttatggagaattttgtacttgtccatgattctatctgcaagatcgagattaaaggtctttttcgactggattaaattagcatttttcaaaagagacttttttaaaggattatag

SEQ ID NO: 559 - DNA, 1542 bp, Artificial Sequence
  source: /note="Description of Artificial Sequence: Synthetic polynucleotide"
atgctatcgaagaatttgtatagtaacaagaggttgctcacctcgacgaatacgctagtcagattcgcttccaccagatccacaggggtggaaaactccggagcaggtcctacatcttttaagaccatgaaagtcattgaccctcagcacagcgacaaaccaaacgtgctgatactgggttcggggtggggagctatttcgtttttaaagcacattgacaccaagaagtacaacgtttccatcatctctcctagaagctatttcttatttacgcctttgttaccttctgcaccagttgggacagtagacgaaaagtcaattattgagcccatcgttaattttgctctcaagaaaaaggggaacgttacctactatgaggcagaagccacctctatcaatcccgacaggaataccgttaccataaaatcattatctgccgttagccagctattccaacctgaaaaccatctagggctgcatcaagcagaacctgctgaaattaagtacgattatttaatcagtgctgtaggtgcggaacctaacacatttggtattcctggggtcactgattacggtcatttcctgaaggaaattcccaactctttggaaataagaagaacttttgccgccaatctagagaaggctaacttattgccaaagggtgatcccgaaagaagaagactactgtccattgtcgtggttggtggtgggcctactggtgtagaggccgctggtgaactacaggattatgttcaccaggacctgagaaagtttctccctgcattggccgaagaagtccaaattcacttggtcgaagctctgcccatcgttttgaatatgtttgagaaaaagctttcatcatacgcgcaatcacatttagaaaacacttcgatcaaagtacatctgagaacggctgtcgccaaagttgaagaaaagcaattgttggcaaagacgaaacacgaagacggtaaaataaccgaagaaactattccatacggtactttgatttgggccacgggtaacaaggcaagaccggtaatcacagaccttttcaagaaaattcctgagcaaaactcgtccaagagaggattggcagtgaatgactttttgcaagtgaaaggcagcaacaacattttcgccattggtgacaatgcatttgctgggttgccaccaaccgcccaagtggcgcaccaagaggccgaatatttggccaagaattttgataaaatggctcaaataccaaatttccaaaagaatctatcttcaagaaaggataaaattgatctcttgttcgaggagaacaactttaaacctttcaaatacaacgatttaggtgccttagcatacctgggatccgaaagggccattgcaaccatacgttccggtaagagaacattttacaccggtggtggcttaatgaccttctacttatggagaattttgtacttgtccatgattctatctgcaagatcgagattaaaggtctttttcgactggattaaattagcatttttcaaaagagacttttttaaaggattatag

SEQ ID NO: 560 - DNA, 1542 bp, Artificial Sequence
  source: /note="Description of Artificial Sequence: Synthetic polynucleotide"
atgctatcgaagaatttgtatagtaacaagaggttgctcacctcgacgaatacgctagtcagattcgcttccaccagatccacaggggtggaaaactccggagcaggtcctacatcttttaagaccatgaaagtcattgaccctcagcacagcgacaaaccaaacgtgctgatactgggttcggggtggggagctatttcgtttttaaagcacattgacaccaagaagtacaacgtttccatcatctctcctagaagctatttcttatttacgcctttgttaccttctgcaccagttgggacagtagacgaaaagtcaattattgagcccatcgttaattttgctctcaagaaaaaggggaacgttacctactatgaggcagaagccacctctatcaatcccgacaggaataccgttaccataaaatcattatctgccgttagccagctataccaacctgaaaaccatctagggctgcatcaagcagaacctgctgaaattaagtacgattatttaatcagtgctgtaggtgcggaacctaacacatttggtattcctggggtcactgattacggtcatttcctgaaggaaattcccaactctttggaaataagaagaacttttgccgccaatctagagaaggctaacttattgccaaagggtgatcccgaaagaagaagactactgtccattgtcgtggttggtggtgggcctactggtgtagaggccgctggtgaactacaggattatgttcaccaggacctgagaaagtttctccctgcattggccgaagaagtccaaattcacttggtcgaagctctgcccatcgttttgaatatgtttgagaaaaagctttcatcatacgcgcaatcacatttagaaaacacttcgatcaaagtacatctgagaacggctgtcgccaaagttgaagaaaagcaattgttggcaaagacgaaacacgaagacggtaaaataaccgaagaaactattccatacggtactttgatttgggccacgggtaacaaggcaagaccggtaatcacagaccttttcaagaaaattcctgagcaaaactcgtccaagagaggattggcagtgaatgactttttgcaagtgaaaggcagcaacaacattttcgccattggtgacaatgcatttgctgggttgccaccaaccgcccaagtggcgcaccaagaggccgaatatttggccaagaattttgataaaatggctcaaataccaaatttccaaaagaatctatcttcaagaaaggataaaattgatctcttgttcgaggagaacaactttaaacctttcaaatacaacgatttaggtgccttagcatacctgggatccgaaagggccattgcaaccatacgttccggtaagagaacattttacaccggtggtggcttaatgaccttctacttatggagaattttgttcttgtccatgattctatctgcaagatcgagattaaaggtctttttcgactggattaaattagcatttttcaaaagagacttttttaaaggattatag

SEQ ID NO: 561 - DNA, 1542 bp, Artificial Sequence
  source: /note="Description of Artificial Sequence: Synthetic polynucleotide"
atgctatcgaagaatttgtatagtaacaagaggttgctcacctcgacgaatacgctagtcagattcgcttccaccagatccacaggggtggaaaactccggagcaggtcctacatcttttaagaccatgaaagtcattgaccctcagcacagcgacaaaccaaacgtgctgatactgggttcggggtggggagctatttcgtttttaaagcacattgacaccaagaagtacaacgtttccatcatctctcctagaagctatttcttatttacgcctttgttaccttctgcaccagttgggacagtagacgaaaagtcaattattgagcccatcgttaattttgctctcaagaaaaaggggaacgttacctactatgaggcagaagccacctctatcaatcccgacaggaataccgttaccataaaatcattatctgccgttagccagctataccaacctgaaaaccatctagggctgcatcaagcagaacctgctgaaattaagtacgattatttaatcagtgctgtaggtgcggaacctaacacatttggtattcctggggtcactgattacggtcatttcctgaaggaaattcccaactctttggaaataagaagaacttttgccgccaatctagagaaggctaacttattgccaaagggtgatcccgaaagaagaagactactgtccattgtcgtggttggtggtgggcctactggtgtagaggccgctggtgaactacaggattatgttcaccaggacctgagaaagtttctccctgcattggccgaagaagtccaaattcacttggtcgaagctctgcccatcgttttgaatatgtttgagaaaaagctttcatcatacgcgcaatcacatttagaaaacacttcgatcaaagtacatctgagaacggctgtcgccaaagttgaagaaaagcaattgttggcaaagacgaaacacgaagacggtaaaataaccgaagaaactattccatacggtactttgatttgggccacgggtaacaaggcaagaccggtaatcacagaccttttcaagaaaattcctgagcaaaactcgtccaagagaggattggcagtgaatgactttttgcaagtgaaaggcagcaacaacattttcgccattggtgacaatgcatttgctgggttgccaccaaccgcccaagtggcgcaccaagaggccgaatatttggccaagaattttgataaaatggctcaaataccaaatttccaaaagaatctatcttcaagaaaggataaaattgatctcttgttcgaggagaacaactttaaacctttcaaatacaacgatttaggtgccttagcatacctgggatccgaaagggccattgcaaccatacgttccggtaagagaacattttacaccggtggtggcttaatgaccttctacttatggagaattttgtacttgtccatgattctaaccgcaagatcgagattaaaggtctttttcgactggattaaattagcatttttcaaaagagacttttttaaaggattatag

SEQ ID NO: 562 - DNA, 1542 bp, Artificial Sequence
  source: /note="Description of Artificial Sequence: Synthetic polynucleotide"
atgctatcgaagaatttgtatagtaacaagaggttgctcacctcgacgaatacgctagtcagattcgcttccaccagatccacaggggtggaaaactccggagcaggtcctacatcttttaagaccatgaaagtcattgaccctcagcacagcgacaaaccaaacgtgctgatactgggttcggggtggggagctatttcgtttttaaagcacattgacaccaagaagtacaacgttaccatcatctctcctagaagctatttcttatttacgcctttgttaccttctgcaccagttgggacagtagacgaaaagtcaattattgagcccatcgttaattttgctctcaagaaaaaggggaacgttacctactatgaggcagaagccacctctatcaatcccgacaggaataccgttaccataaaatcattatctgccgttagccagctataccaacctgaaaaccatctagggctgcatcaagcagaacctgctgaaattaagtacgattatttaatcagtgctgtaggtgcggaacctaacacatttggtattcctggggtcactgattacggtcatttcctgaaggaaattcccaactctttggaaataagaagaacttttgccgccaatctagagaaggctaacttattgccaaagggtgatcccgaaagaagaagactactgtccattgtcgtggttggtggtgggcctactggtgtagaggccgctggtgaactacaggattatgttcaccaggacctgagaaagtttctccctgcattggccgaagaagtccaaattcacttggtcgaagctctgcccatcgttttgaatatgtttgagaaaaagctttcatcatacgcgcaatcacatttagaaaacacttcgatcaaagtacatctgagaacggctgtcgccaaagttgaagaaaagcaattgttggcaaagacgaaacacgaagacggtaaaataaccgaagaaactattccatacggtactttgatttgggccacgggtaacaaggcaagaccggtaatcacagaccttttcaagaaaattcctgagcaaaactcgtccaagagaggattggcagtgaatgactttttgcaagtgaaaggcagcaacaacattttcgccattggtgacaatgcatttgctgggttgccaccaaccgcccaagtggcgcaccaagaggccgaatatttggccaagaattttgataaaatggctcaaataccaaatttccaaaagaatctatcttcaagaaaggataaaattgatctcttgttcgaggagaacaactttaaacctttcaaatacaacgatttaggtgccttagcatacctgggatccgaaagggccattgcaaccatacgttccggtaagagaacattttacaccggtggtggcttaatgaccttctacttatggagaattttgtacttgtccatgattctatctgcaagatcgagattaaaggtctttttcgactggattaaattagcatttttcaaaagagacttttttaaaggattatag

SEQ ID NO: 563 - DNA, 1542 bp, Artificial Sequence
  source: /note="Description of Artificial Sequence: Synthetic polynucleotide"
atgctatcgaagaatttgtatagtaacaagaggttgctcacctcgacgaatacgctagtcagattcgcttccaccagatccacaggggtggaaaactccggagcaggtcctacatcttttaagaccatgaaagtcattgaccctcagcacagcgacaaaccaaacgtgctgatactgggttcggggtggggagctatttcgtttttaaagcacattgacaccaagaagtacaacgtttccatcatctctcctagaagctatttcttatttacgcctttgttaccttctgcaccagttgggacagtagacgaaaagtcaattattgagcccatcgttaattttgctctcaagaaaaaggggaacgttacctactatgaggcagaagccacctctatcaatcccgacaggaataccgttaccataaaatcattatctgccgttagccagctataccaacctgaaaaccatctagggctgcatcaagcagaacctgctgaaattaagtacgattatttaatcagtgctgtaggtgcggaacctaacacatttggtattcctggggtcactgattacggtcatttcctggaggaaattcccaactctttggaaataagaagaacttttgccgccaatctagagaaggctaacttattgccaaagggtgatcccgaaagaagaagactactgtccattgtcgtggttggtggtgggcctactggtgtagaggccgctggtgaactacaggattatgttcaccaggacctgagaaagtttctccctgcattggccgaagaagtccaaattcacttggtcgaagctctgcccatcgttttgaatatgtttgagaaaaagctttcatcatacgcgcaatcacatttagaaaacacttcgatcaaagtacatctgagaacggctgtcgccaaagttgaagaaaagcaattgttggcaaagacgaaacacgaagacggtaaaataaccgaagaaactattccatacggtactttgatttgggccacgggtaacaaggcaagaccggtaatcacagaccttttcaagaaaattcctgagcaaaactcgtccaagagaggattggcagtgaatgactttttgcaagtgaaaggcagcaacaacattttcgccattggtgacaatgcatttgctgggttgccaccaaccgcccaagtggcgcaccaagaggccgaatatttggccaagaattttgataaaatggctcaaataccaaatttccaaaagaatctatcttcaagaaaggataaaattgatctcttgttcgaggagaacaactttaaacctttcaaatacaacgatttaggtgccttagcatacctgggatccgaaagggccattgcaaccatacgttccggtaagagaacattttacaccggtggtggcttaatgaccttctacttatggagaattttgtacttgtccatgattctatctgcaagatcgagattaaaggtctttttcgactggattaaattagcatttttcaaaagagacttttttaaaggattatag

SEQ ID NO: 564 - DNA, 1542 bp, Artificial Sequence
  source: /note="Description of Artificial Sequence: Synthetic polynucleotide"
atgctatcgaagaatttgtatagtaacaagaggttgctcacctcgacgaatacgctagtcagattcgcttccaccagatccacaggggtggaaaactccggagcaggtcctacatcttttaagaccatgaaaatcattgaccctcagcacagcgacaaaccaaacgtgctgatactgggttcggggtggggagctatttcgtttttaaagcacattgacaccaagaagtacaacgtttccatcatctctcctagaagctatttcttatttacgcctttgttaccttctgcaccagttgggacagtagacgaaaagtcaattattgagcccatcgttaattttgctctcaagaaaaaggggaacgttacctactatgaggcagaagccacctctatcaatcccgacaggaataccgttaccataaaatcattatctgccgttagccagctataccaacctgaaaaccatctagggctgcatcaagcagaacctgctgaaattaagtacgattatttaatcagtgctgtaggtgcggaacctaacacatttggtattcctggggtcactgattacggtcatttcctgaaggaaattcccaactctttggaaataagaagaacttttgccgccaatctagagaaggctaacttattgccaaagggtgatcccgaaagaagaagactactgtccattgtcgtggttggtggtgggcctactggtgtagaggccgctggtgaactacaggattatgttcaccaggacctgagaaagtttctccctgcattggccgaagaagtccaaattcacttggtcgaagctctgcccatcgttttgaatatgtttgagaaaaagctttcatcatacgcgcaatcacatttagaaaacacttcgatcaaagtacatctgagaacggctgtcgccaaagttgaagaaaagcaattgttggcaaagacgaaacacgaagacggtaaaataaccgaagaaactattccatacggtactttgatttgggccacgggtaacaaggcaagaccggtaatcacagaccttttcaagaaaattcctgagcaaaactcgtccaagagaggattggcagtgaatgactttttgcaagtgaaaggcagcaacaacattttcgccattggtgacaatgcatttgctgggttgccaccaaccgcccaagtggcgcaccaagaggccgaatatttggccaagaattttgataaaatggctcaaataccaaatttccaaaagaatctatcttcaagaaaggataaaattgatctcttgttcgaggagaacaactttaaacctttcaaatacaacgatttaggtgccttagcatacctgggatccgaaagggccattgcaaccatacgttccggtaagagaacattttacaccggtggtggcttaatgaccttctacttatggagaattttgtacttgtccatgattctatctgcaagatcgagattaaaggtctttttcgactggattaaattagcatttttcaaaagagacttttttaaaggattatag

SEQ ID NO: 565 - DNA, 1542 bp, Artificial Sequence
  source: /note="Description of Artificial Sequence: Synthetic polynucleotide"
atgctatcgaagaatttgtatagtaacaagaggttgctcacctcgacgaatacgctagtcagattcgcttccaccagatccacaggggtggaaaactccggagcaggtcctacatcttttaagaccatgaaagtcattgaccctcagcacagcgacaaaccaaacgtgctgatactgggttcggggtggggagctatttcgtttttaaagcacattgacaccaagaagtacaacgtttccatcatctctcctagaagctatttcttatttacgcctttgttaccttctgcaccagttgggacagtagacgaaaagtcaattattgagcccatcgttaattttgctctcaagaaaaaggggaacgttacctactatgaggcagaagccacctctatcaatcccgacaggaataccgttaccataaaatcattatctgccgttagccagctataccaacctgaaaaccatctagggctgcatcaagcagaacctgctgaaattaagtacgattatttaatcagtgctgtaggtgcggaacctaacacatttggtattcctggggtcactgattacggtcatttcctgaaggaaattcccaactctttggaaataagaagaacttttgccgccaatctagagaaggctaacttattgccaaagggtgatcccgaaagaagaagactactgtccattgtcgtggttggtggtgggcctactggtgtagaggccgctggtgaactacaggattatgttcaccaggacctgagaaagtttctccctgcattggccgaagaagtccaaattcacttggtcgaagctctgcccatcgttttgaatatgtttgagaaaaagctttcatcatacgcgcaatcacatttagaaaacacttcgatcaaagtacatctgagaacggctgtcgccaaagttgaagaaaagcaattgttggcaaagacgaaacacgaagacggtaaaataaccgaagaaactattccatacggtactttgatttgggccacgggtaacaaggcaagaccggtaatcacagaccttttcaagaaaattcctgagcaaaactcgtccaagagaggattggcagtgaatgactttttgcaagtgaaaggcagcaacaacattttcgccattggtgacaatgcatttgctgggttgccaccaaccgcccaagtggcgcaccaagaggccgaatatttggccaagaattttgataaaatggctcaaataccaaatttccaaaagaatctatcttcaagaaaggataaaattgatctcttgttcgaggagaacaactttaaacctttcaaatacaacgatttaggtgccttagcatacctgggatccgaaagggccattgcaaccatacgttccggtaagagaacattttacaccggtggtggcttaatgaccttctacttatggagaattttgtacatgtccatgattctatctgcaagatcgagattaaaggtctttttcgactggattaaattagcatttttcaaaagagacttttttaaaggattatag

SEQ ID NO: 566 - DNA, 1542 bp, Artificial Sequence
  source: /note="Description of Artificial Sequence: Synthetic polynucleotide"
atgctgagcaagaacctgtacagcaacaagcggctgctgaccagcaccaacaccctcgtgcgcttcgccagcaccagatccaccggcgtcgaaaacagcggggctggccccaccagcttcaagaccatgaaggtcatcgacccccagcacagcgacaagcccaacgtgctgatcctgggctctggctggggcgccatcagctttctgaagcacatcgacaccaagaagtacaacgtcagcatcgtgagccccagaagctacttcctgttcacccccctgctgcccagcgcccctgtgggaaccgtggacgagaagtccatcatcgagcccatcgtgaacttcgccctgaagaaaaagggcaacgtcacctactacgaggccgaggccaccagcatcaaccccgaccggaacaccgtgaccatcaagagcctgagcgccgtgtcccagctgtaccagcccgagaaccacctgggcctgcaccaggccgagcccgccgagattaagtacgactacctgatcagcgccgtgggcgccgagcccaacacctttggaatccccggcgtgaccgactacggccacttcctgaaagagatccccaacagcctggaaatccggcggaccttcgccgccaacctggaaaaggccaacctgctgcctaagggcgaccccgagcggagaaggctgctgagcatcgtggtcgtgggcggaggccccacaggcgtggaagctgctggcgagctgcaggactacgtgcaccaggacctgcggaagttcctgcccgccctggccgaggaagtgcagattcacctggtggaagccctgcccatcgtgctgaacatgttcgagaagaagctgagcagctacgcccagagccacctggaaaacacctccatcaaggtgcacctgagaaccgccgtggccaaggtggaagagaagcagctgctggccaagaccaagcacgaggacggcaagattaccgaggaaaccatcccctacggcaccctgatttgggccaccggcaacaaggccagacccgtgatcaccgacctgttcaagaagatccccgagcagaacagcagcaagcggggcctggccgtgaacgacttcctgcaggtcaaaggcagcaacaacatcttcgccatcggcgacaacgcctttgccggcctgcctcctacagcccaggtggcccaccaggaagccgagtacctggccaagaacttcgacaagatggcccagatccccaatttccagaagaacctgtcctcccggaaggataagatcgacctgctgttcgaggaaaacaacttcaagcccttcaagtacaacgacctgggcgccctggcctacctgggcagcgaaagagccattgccaccatcagaagcggcaagcggaccttctacaccggcggaggcctgatgaccttctacctgtggcggatcctgtacctgagcatgatcctgagcgcccgcagcagactgaaggtgttcttcgactggatcaagctggccttcttcaagagggacttcttcaagggcctgtga

SEQ ID NO: 567 - DNA, 1542 bp, Artificial Sequence
  source: /note="Description of Artificial Sequence: Synthetic polynucleotide"
atgctgagcaagaacctgtacagcaacaagcggctgctgaccagcaccaacaccctcgtgcgcttcgccagcaccagatccaccggcgtcgaaaacagcggggctggccccaccagcttcaagaccatgaaggtcatcgacccccagcacagcgacaagcccaacgtgctgatcctgggctctggctggggcgccatcagctttctgaagcacatcgacaccaagaagtacaacgtcagcatcatcagccccagaagctacttcctgtacacccccctgctgcccagcgcccctgtgggaaccgtggacgagaagtccatcatcgagcccatcgtgaacttcgccctgaagaaaaagggcaacgtcacctactacgaggccgaggccaccagcatcaaccccgaccggaacaccgtgaccatcaagagcctgagcgccgtgtcccagctgtaccagcccgagaaccacctgggcctgcaccaggccgagcccgccgagattaagtacgactacctgatcagcgccgtgggcgccgagcccaacacctttggaatccccggcgtgaccgactacggccacttcctgaaagagatccccaacagcctggaaatccggcggaccttcgccgccaacctggaaaaggccaacctgctgcctaagggcgaccccgagcggagaaggctgctgagcatcgtggtcgtgggcggaggccccacaggcgtggaagctgctggcgagctgcaggactacgtgcaccaggacctgcggaagttcctgcccgccctggccgaggaagtgcagattcacctggtggaagccctgcccatcgtgctgaacatgttcgagaagaagctgagcagctacgcccagagccacctggaaaacacctccatcaaggtgcacctgagaaccgccgtggccaaggtggaagagaagcagctgctggccaagaccaagcacgaggacggcaagattaccgaggaaaccatcccctacggcaccctgatttgggccaccggcaacaaggccagacccgtgatcaccgacctgttcaagaagatccccgagcagaacagcagcaagcggggcctggccgtgaacgacttcctgcaggtcaaaggcagcaacaacatcttcgccatcggcgacaacgcctttgccggcctgcctcctacagcccaggtggcccaccaggaagccgagtacctggccaagaacttcgacaagatggcccagatccccaatttccagaagaacctgtcctcccggaaggataagatcgacctgctgttcgaggaaaacaacttcaagcccttcaagtacaacgacctgggcgccctggcctacctgggcagcgaaagagccattgccaccatcagaagcggcaagcggaccttctacaccggcggaggcctgatgaccttctacctgtggcggatcctgtacctgagcatgatcctgagcgcccgcagcagactgaaggtgttcttcgactggatcaagctggccttcttcaagagggacttcttcaagggcctgtga

SEQ ID NO: 568 - DNA, 1542 bp, Artificial Sequence
  source: /note="Description of Artificial Sequence: Synthetic polynucleotide"
atgctgagcaagaacctgtacagcaacaagcggctgctgaccagcaccaacaccctcgtgcgcttcgccagcaccagatccaccggcgtcgaaaacagcggggctggccccaccagcttcaagaccatgaaggtcatcgacccccagcacagcgacaagcccaacgtgctgatcctgggctctggctggggcgccatcagctttctgaagcacatcgacaccaagaagtacaacgtcagcatcatcagccccagaagctacttcatcttcacccccctgctgcccagcgcccctgtgggaaccgtggacgagaagtccatcatcgagcccatcgtgaacttcgccctgaagaaaaagggcaacgtcacctactacgaggccgaggccaccagcatcaaccccgaccggaacaccgtgaccatcaagagcctgagcgccgtgtcccagctgtaccagcccgagaaccacctgggcctgcaccaggccgagcccgccgagattaagtacgactacctgatcagcgccgtgggcgccgagcccaacacctttggaatccccggcgtgaccgactacggccacttcctgaaagagatccccaacagcctggaaatccggcggaccttcgccgccaacctggaaaaggccaacctgctgcctaagggcgaccccgagcggagaaggctgctgagcatcgtggtcgtgggcggaggccccacaggcgtggaagctgctggcgagctgcaggactacgtgcaccaggacctgcggaagttcctgcccgccctggccgaggaagtgcagattcacctggtggaagccctgcccatcgtgctgaacatgttcgagaagaagctgagcagctacgcccagagccacctggaaaacacctccatcaaggtgcacctgagaaccgccgtggccaaggtggaagagaagcagctgctggccaagaccaagcacgaggacggcaagattaccgaggaaaccatcccctacggcaccctgatttgggccaccggcaacaaggccagacccgtgatcaccgacctgttcaagaagatccccgagcagaacagcagcaagcggggcctggccgtgaacgacttcctgcaggtcaaaggcagcaacaacatcttcgccatcggcgacaacgcctttgccggcctgcctcctacagcccaggtggcccaccaggaagccgagtacctggccaagaacttcgacaagatggcccagatccccaatttccagaagaacctgtcctcccggaaggataagatcgacctgctgttcgaggaaaacaacttcaagcccttcaagtacaacgacctgggcgccctggcctacctgggcagcgaaagagccattgccaccatcagaagcggcaagcggaccttctacaccggcggaggcctgatgaccttctacctgtggcggatcctgtacctgagcatgatcctgagcgcccgcagcagactgaaggtgttcttcgactggatcaagctggccttcttcaagagggacttcttcaagggcctgtga

SEQ ID NO: 569 - DNA, 1542 bp, Artificial Sequence
  source: /note="Description of Artificial Sequence: Synthetic polynucleotide"
atgctgagcaagaacctgtacagcaacaagcggctgctgaccagcaccaacaccctcgtgcgcttcgccagcaccagatccaccggcgtcgaaaacagcggggctggccccaccagcttcaagaccatgaaggtcatcgacccccagcacagcgacaagcccaacgtgctgatcctgggctctggctggggcgccatcagctttctgaagcacatcgacaccaagaagtacaacgtcagcatcatcagccccagaagctacttcctgttcacccccctgctgcccagcgcccctgtgggaaccgtggacgagaagtccatcatcgagcccatcgtgaacttcgccctgaagaaaaagggcaacgtcacctactacgaggccgaggccaccagcatcaaccccgaccggaacaccgtgaccatcaagagcctgagcgccgtgtcccagctgtaccagcccgagaaccacctgggcctgcaccaggccgagcccgccgagattaagtacgactacctgatcagcgccgtgggcgccgagcccaacacctttggaatccccggcgtgaccgactacggccacttcctgaaagagatccccaacagcctggaaatccggcggaccttcgccgccaacctggaaaaggccaacctgctgcctaagggcgaccccgagcggagaaggctgctgagcatcgtggtcgtgggcggaggccccacaggcgtggaagctgctggcgagctgcaggactacgtgcaccaggacctgcggaagttcctgcccgccctggccgaggaaatccagattcacctggtggaagccctgcccatcgtgctgaacatgttcgagaagaagctgagcagctacgcccagagccacctggaaaacacctccatcaaggtgcacctgagaaccgccgtggccaaggtggaagagaagcagctgctggccaagaccaagcacgaggacggcaagattaccgaggaaaccatcccctacggcaccctgatttgggccaccggcaacaaggccagacccgtgatcaccgacctgttcaagaagatccccgagcagaacagcagcaagcggggcctggccgtgaacgacttcctgcaggtcaaaggcagcaacaacatcttcgccatcggcgacaacgcctttgccggcctgcctcctacagcccaggtggcccaccaggaagccgagtacctggccaagaacttcgacaagatggcccagatccccaatttccagaagaacctgtcctcccggaaggataagatcgacctgctgttcgaggaaaacaacttcaagcccttcaagtacaacgacctgggcgccctggcctacctgggcagcgaaagagccattgccaccatcagaagcggcaagcggaccttctacaccggcggaggcctgatgaccttctacctgtggcggatcctgtacctgagcatgatcctgagcgcccgcagcagactgaaggtgttcttcgactggatcaagctggccttcttcaagagggacttcttcaagggcctgtga

SEQ ID NO: 570 - DNA, 1542 bp, Artificial Sequence; identical to SEQ ID NO: 140
  source: /note="Description of Artificial Sequence: Synthetic polynucleotide"

SEQ ID NO: 571 - DNA, 1542 bp, Artificial Sequence
  source: /note="Description of Artificial Sequence: Synthetic polynucleotide"
atgctgagcaagaacctgtacagcaacaagcggctgctgaccagcaccaacaccctcgtgcgcttcgccagcaccagatccaccggcgtcgaaaacagcggggctggccccaccagcttcaagaccatgaaggtcatcgacccccagcacagcgacaagcccaacgtgctgatcctgggctctggctggggcgccatcagctttctgaagcacatcgacaccaagaagtacaacgtcagcatcatcagccccagaagctacttcctgttcacccccctgctgcccagcgcccctgtgggaaccgtggacgagaagtccatcatcgagcccatcgtgaacttcgccctgaagaaaaagggcaacgtcacctactacgaggccgaggccaccagcatcaaccccgaccggaacaccgtgaccatcaagagcctgagcgccgtgtcccagctgtaccagcccgagaaccacctgggcctgcaccaggccgagcccgccgagattaagtacgactacctgatcagcgccgtgggcgccgagcccaacacctttggaatccccggcgtgaccgactacggccacttcctgaaagagatccccaacagcctggaaatccggcggaccttcgccgccaacctggaaaaggccaacctgctgcctaagggcgaccccgagcggagaaggctgctgagcatcgtggtcgtgggcggaggccccacaggcgtggaagctgctggcgagctgcaggactacgtgcaccaggacctgcggaagttcctgcccgccctggccgaggaagtgcagattcacctggtggaagccctgcccatcgtgctgaacatgttcgagaagaagctgagcagctacgcccagagccacctggaaaacacctccatcaaggtgcacctgagaaccgccgtggccaaggtggaagagaagcagctgctggccaagaccaagcacgaggacggcaagattaccgaggaaaccatcccctacggcaccctgatttgggccaccggcaacaaggccagacccgtgatcaccgacctgttcaagaagatccccgagcagaacagcagcaagcggggcctggccgtgaacgacttcctgcaggtcaaaggcagcaacaacatcttcgccatcggcgacaacgcctttgccggcctgcctcctacagcccaggtggcccaccaggaagccgagtacctggccaagaacttcgacaagatggcccagatccccaatttccagaagaacctgtcctcccggaaggataagatcgacctgctgttcgaggaaaacaacttcaagcccttcaagtacaacgacctgggcgccctggcctacctgggcagcgaaagagccattgccaccatcagaagcggcaagcggaccttctacaccggcggaggcctgatgaccttctacctgtggcggatcatctacctgagcatgatcctgagcgcccgcagcagactgaaggtgttcttcgactggatcaagctggccttcttcaagagggacttcttcaagggcctgtga

SEQ ID NO: 572 - DNA, 1542 bp, Artificial Sequence
  source: /note="Description of Artificial Sequence: Synthetic polynucleotide"
atgctgagcaagaacctgtacagcaacaagcggctgctgaccagcaccaacaccctcgtgcgcttcgccagcaccagatccaccggcgtcgaaaacagcggggctggccccaccagcttcaagaccatgaaggtcatcgacccccagcacagcgacaagcccaacgtgctgatcctgggctctggctggggcgccatcagctttctgaagcacatcgacaccaagaagtacaacgtcagcatcatcagccccagaagctacttcctgttcacccccctgctgcccagcgcccctgtgggaaccgtggacgagaagtccatcatcgagcccatcgtgaacttcgccctgaagaaaaagggcaacgtcacctactacgaggccgaggccaccagcatcaaccccgaccggaacaccgtgaccatcaagagcctgagcgccgtgtcccagctgtaccagcccgagaaccacctgggcctgcaccaggccgagcccgccgagattaagtacgactacctgatcagcgccgtgggcgccgagcccaacacctttggaatccccggcgtgaccgactacggccacttcctgaaagagatccccaacagcatggaaatccggcggaccttcgccgccaacctggaaaaggccaacctgctgcctaagggcgaccccgagcggagaaggctgctgagcatcgtggtcgtgggcggaggccccacaggcgtggaagctgctggcgagctgcaggactacgtgcaccaggacctgcggaagttcctgcccgccctggccgaggaagtgcagattcacctggtggaagccctgcccatcgtgctgaacatgttcgagaagaagctgagcagctacgcccagagccacctggaaaacacctccatcaaggtgcacctgagaaccgccgtggccaaggtggaagagaagcagctgctggccaagaccaagcacgaggacggcaagattaccgaggaaaccatcccctacggcaccctgatttgggccaccggcaacaaggccagacccgtgatcaccgacctgttcaagaagatccccgagcagaacagcagcaagcggggcctggccgtgaacgacttcctgcaggtcaaaggcagcaacaacatcttcgccatcggcgacaacgcctttgccggcctgcctcctacagcccaggtggcccaccaggaagccgagtacctggccaagaacttcgacaagatggcccagatccccaatttccagaagaacctgtcctcccggaaggataagatcgacctgctgttcgaggaaaacaacttcaagcccttcaagtacaacgacctgggcgccctggcctacctgggcagcgaaagagccattgccaccatcagaagcggcaagcggaccttctacaccggcggaggcctgatgaccttctacctgtggcggatcctgtacctgagcatgatcctgagcgcccgcagcagactgaaggtgttcttcgactggatcaagctggccttcttcaagagggacttcttcaagggcctgtga

SEQ ID NO: 573 - DNA, 1542 bp, Artificial Sequence
  source: /note="Description of Artificial Sequence: Synthetic polynucleotide"
atgctgagcaagaacctgtacagcaacaagcggctgctgaccagcaccaacaccctcgtgcgcttcgccagcaccagatccaccggcgtcgaaaacagcggggctggccccaccagcttcaagaccatgaaggtcatcgacccccagcacagcgacaagcccaacgtgctgatcctgggctctggctggggcgccatcagctttctgaagcacatcgacaccaagaagtacaacgtcagcatcatcagccccagaagctacttcctgttcacccccctgctgcccagcgcccctgtgggaaccgtggacgagaagtccatcatcgagcccatcgtgaacttcgccctgaagaaaaagggcaacgtcacctactacgaggccgaggccaccagcatcaaccccgaccggaacaccgtgaccatcaagagcctgagcgccgtgtcccagctgtaccagcccgagaaccacctgggcctgcaccaggccgagcccgccgagattaagtacgactacctgatcagcgccgtgggcgccgagcccaacacctttggaatccccggcgtgaccgactacggccacttcctgaaagagatccccaacagcctggaaatccggcggaccttcgccgccaacctggaaaaggccaacctgctgcctaagggcgaccccgagcggagaaggctgctgagcatcgtggtcgtgggcggaggccccacaggcgtggaagctgctggcgagctgcaggactacgtgcaccaggacctgcggaagttcgtgcccgccctggccgaggaagtgcagattcacctggtggaagccctgcccatcgtgctgaacatgttcgagaagaagctgagcagctacgcccagagccacctggaaaacacctccatcaaggtgcacctgagaaccgccgtggccaaggtggaagagaagcagctgctggccaagaccaagcacgaggacggcaagattaccgaggaaaccatcccctacggcaccctgatttgggccaccggcaacaaggccagacccgtgatcaccgacctgttcaagaagatccccgagcagaacagcagcaagcggggcctggccgtgaacgacttcctgcaggtcaaaggcagcaacaacatcttcgccatcggcgacaacgcctttgccggcctgcctcctacagcccaggtggcccaccaggaagccgagtacctggccaagaacttcgacaagatggcccagatccccaatttccagaagaacctgtcctcccggaaggataagatcgacctgctgttcgaggaaaacaacttcaagcccttcaagtacaacgacctgggcgccctggcctacctgggcagcgaaagagccattgccaccatcagaagcggcaagcggaccttctacaccggcggaggcctgatgaccttctacctgtggcggatcctgtacctgagcatgatcctgagcgcccgcagcagactgaaggtgttcttcgactggatcaagctggccttcttcaagagggacttcttcaagggcctgtga

SEQ ID NO: 574 - DNA, 1542 bp, Artificial Sequence
  source: /note="Description of Artificial Sequence: Synthetic polynucleotide"
atgctgagcaagaacctgtacagcaacaagcggctgctgaccagcaccaacaccctcgtgcgcttcgccagcaccagatccaccggcgtcgaaaacagcggggctggccccaccagcttcaagaccatgaaggtcatcgacccccagcacagcgacaagcccaacgtgctgatcctgggctctggctggggcgccatcagctttctgaagcacatcgacaccaagaagtacaacgtcagcatcatcagccccagaagctacttcctgttcacccccctgctgcccagcgcccctgtgggaaccgtggacgagaagtccatcatcgagcccatcgtgaacttcgccctgaagaaaaagggcaacgtcacctactacgaggccgaggccaccagcatcaaccccgaccggaacaccgtgaccatcaagagcctgagcgccgtgtcccagctgtaccagcccgagaaccacctgggcctgcaccaggccgagcccgccgagattaagtacgactacctgatcagcgccgtgggcgccgagcccaacacctttggaatccccggcgtgaccgactacggccacttcatcaaagagatccccaacagcctggaaatccggcggaccttcgccgccaacctggaaaaggccaacctgctgcctaagggcgaccccgagcggagaaggctgctgagcatcgtggtcgtgggcggaggccccacaggcgtggaagctgctggcgagctgcaggactacgtgcaccaggacctgcggaagttcctgcccgccctggccgaggaagtgcagattcacctggtggaagccctgcccatcgtgctgaacatgttcgagaagaagctgagcagctacgcccagagccacctggaaaacacctccatcaaggtgcacctgagaaccgccgtggccaaggtggaagagaagcagctgctggccaagaccaagcacgaggacggcaagattaccgaggaaaccatcccctacggcaccctgatttgggccaccggcaacaaggccagacccgtgatcaccgacctgttcaagaagatccccgagcagaacagcagcaagcggggcctggccgtgaacgacttcctgcaggtcaaaggcagcaacaacatcttcgccatcggcgacaacgcctttgccggcctgcctcctacagcccaggtggcccaccaggaagccgagtacctggccaagaacttcgacaagatggcccagatccccaatttccagaagaacctgtcctcccggaaggataagatcgacctgctgttcgaggaaaacaacttcaagcccttcaagtacaacgacctgggcgccctggcctacctgggcagcgaaagagccattgccaccatcagaagcggcaagcggaccttctacaccggcggaggcctgatgaccttctacctgtggcggatcctgtacctgagcatgatcctgagcgcccgcagcagactgaaggtgttcttcgactggatcaagctggccttcttcaagagggacttcttcaagggcctgtga

SEQ ID NO: 575 - DNA, 1542 bp, Artificial Sequence
  source: /note="Description of Artificial Sequence: Synthetic polynucleotide"
atgctgagcaagaacctgtacagcaacaagcggctgctgaccagcaccaacaccctcgtgcgcttcgccagcaccagatccaccggcgtcgaaaacagcggggctggccccaccagcttcaagaccatgaaggtcatcgacccccagcacagcgacaagcccaacgtgctgatcctgggctctggctggggcgccatcagctttctgaagcacatcgacaccaagaagtacaacgtcagcgtgatcagccccagaagctacttcctgttcacccccctgctgcccagcgcccctgtgggaaccgtggacgagaagtccatcatcgagcccatcgtgaacttcgccctgaagaaaaagggcaacgtcacctactacgaggccgaggccaccagcatcaaccccgaccggaacaccgtgaccatcaagagcctgagcgccgtgtcccagctgtaccagcccgagaaccacctgggcctgcaccaggccgagcccgccgagattaagtacgactacctgatcagcgccgtgggcgccgagcccaacacctttggaatccccggcgtgaccgactacggccacttcctgaaagagatccccaacagcctggaaatccggcggaccttcgccgccaacctggaaaaggccaacctgctgcctaagggcgaccccgagcggagaaggctgctgagcatcgtggtcgtgggcggaggccccacaggcgtggaagctgctggcgagctgcaggactacgtgcaccaggacctgcggaagttcctgcccgccctggccgaggaagtgcagattcacctggtggaagccctgcccatcgtgctgaacatgttcgagaagaagctgagcagctacgcccagagccacctggaaaacacctccatcaaggtgcacctgagaaccgccgtggccaaggtggaagagaagcagctgctggccaagaccaagcacgaggacggcaagattaccgaggaaaccatcccctacggcaccctgatttgggccaccggcaacaaggccagacccgtgatcaccgacctgttcaagaagatccccgagcagaacagcagcaagcggggcctggccgtgaacgacttcctgcaggtcaaaggcagcaacaacatcttcgccatcggcgacaacgcctttgccggcctgcctcctacagcccaggtggcccaccaggaagccgagtacctggccaagaacttcgacaagatggcccagatccccaatttccagaagaacctgtcctcccggaaggataagatcgacctgctgttcgaggaaaacaacttcaagcccttcaagtacaacgacctgggcgccctggcctacctgggcagcgaaagagccattgccaccatcagaagcggcaagcggaccttctacaccggcggaggcctgatgaccttctacctgtggcggatcctgtacctgagcatgatcctgagcgcccgcagcagactgaaggtgttcttcgactggatcaagctggccttcttcaagagggacttcttcaagggcctgtga

SEQ ID NO: 576 - DNA, 1542 bp, Artificial Sequence
  source: /note="Description of Artificial Sequence: Synthetic polynucleotide"
atgctgagcaagaacctgtacagcaacaagcggctgctgaccagcaccaacaccctcgtgcgcttcgccagcaccagatccaccggcgtcgaaaacagcggggctggccccaccagcttcaagaccatgaaggtcatcgacccccagcacagcgacaagcccaacgtgctgatcctgggctctggctggggcgccatcagctttctgaagcacatcgacaccaagaagtacaacgtcagcatcatcagccccagaagctacttcctgttcacccccctgctgcccagcgcccctgtgggaaccgtggacgagaagtccatcatcgagcccatcgtgaacttcgccctgaagaaaaagggcaacgtcacctactacgaggccgaggccaccagcatcaaccccgaccggaacaccgtgaccatcaagagcctgagcgccgtgtcccagatgtaccagcccgagaaccacctgggcctgcaccaggccgagcccgccgagattaagtacgactacctgatcagcgccgtgggcgccgagcccaacacctttggaatccccggcgtgaccgactacggccacttcctgaaagagatccccaacagcctggaaatccggcggaccttcgccgccaacctggaaaaggccaacctgctgcctaagggcgaccccgagcggagaaggctgctgagcatcgtggtcgtgggcggaggccccacaggcgtggaagctgctggcgagctgcaggactacgtgcaccaggacctgcggaagttcctgcccgccctggccgaggaagtgcagattcacctggtggaagccctgcccatcgtgctgaacatgttcgagaagaagctgagcagctacgcccagagccacctggaaaacacctccatcaaggtgcacctgagaaccgccgtggccaaggtggaagagaagcagctgctggccaagaccaagcacgaggacggcaagattaccgaggaaaccatcccctacggcaccctgatttgggccaccggcaacaaggccagacccgtgatcaccgacctgttcaagaagatccccgagcagaacagcagcaagcggggcctggccgtgaacgacttcctgcaggtcaaaggcagcaacaacatcttcgccatcggcgacaacgcctttgccggcctgcctcctacagcccaggtggcccaccaggaagccgagtacctggccaagaacttcgacaagatggcccagatccccaatttccagaagaacctgtcctcccggaaggataagatcgacctgctgttcgaggaaaacaacttcaagcccttcaagtacaacgacctgggcgccctggcctacctgggcagcgaaagagccattgccaccatcagaagcggcaagcggaccttctacaccggcggaggcctgatgaccttctacctgtggcggatcctgtacctgagcatgatcctgagcgcccgcagcagactgaaggtgttcttcgactggatcaagctggccttcttcaagagggacttcttcaagggcctgtga

SEQ ID NO: 577 - DNA, 1542 bp, Artificial Sequence
  source: /note="Description of Artificial Sequence: Synthetic polynucleotide"
atgctgagcaagaacctgtacagcaacaagcggctgctgaccagcaccaacaccctcgtgcgcttcgccagcaccagatccaccggcgtcgaaaacagcggggctggccccaccagcttcaagaccatgaaggtcatcgacccccagcacagcgacaagcccaacgtgctgatcctgggctctggctggggcgccatcagctttctgaagcacatcgacaccaagaagtacaacgtcagcatcatcagccccaagagctacttcctgttcacccccctgctgcccagcgcccctgtgggaaccgtggacgagaagtccatcatcgagcccatcgtgaacttcgccctgaagaaaaagggcaacgtcacctactacgaggccgaggccaccagcatcaaccccgaccggaacaccgtgaccatcaagagcctgagcgccgtgtcccagctgtaccagcccgagaaccacctgggcctgcaccaggccgagcccgccgagattaagtacgactacctgatcagcgccgtgggcgccgagcccaacacctttggaatccccggcgtgaccgactacggccacttcctgaaagagatccccaacagcctggaaatccggcggaccttcgccgccaacctggaaaaggccaacctgctgcctaagggcgaccccgagcggagaaggctgctgagcatcgtggtcgtgggcggaggccccacaggcgtggaagctgctggcgagctgcaggactacgtgcaccaggacctgcggaagttcctgcccgccctggccgaggaagtgcagattcacctggtggaagccctgcccatcgtgctgaacatgttcgagaagaagctgagcagctacgcccagagccacctggaaaacacctccatcaaggtgcacctgagaaccgccgtggccaaggtggaagagaagcagctgctggccaagaccaagcacgaggacggcaagattaccgaggaaaccatcccctacggcaccctgatttgggccaccggcaacaaggccagacccgtgatcaccgacctgttcaagaagatccccgagcagaacagcagcaagcggggcctggccgtgaacgacttcctgcaggtcaaaggcagcaacaacatcttcgccatcggcgacaacgcctttgccggcctgcctcctacagcccaggtggcccaccaggaagccgagtacctggccaagaacttcgacaagatggcccagatccccaatttccagaagaacctgtcctcccggaaggataagatcgacctgctgttcgaggaaaacaacttcaagcccttcaagtacaacgacctgggcgccctggcctacctgggcagcgaaagagccattgccaccatcagaagcggcaagcggaccttctacaccggcggaggcctgatgaccttctacctgtggcggatcctgtacctgagcatgatcctgagcgcccgcagcagactgaaggtgttcttcgactggatcaagctggccttcttcaagagggacttcttcaagggcctgtga

SEQ ID NO: 578 - DNA, 1542 bp, Artificial Sequence
  source: /note="Description of Artificial Sequence: Synthetic polynucleotide"
atgctgagcaagaacctgtacagcaacaagcggctgctgaccagcaccaacaccctcgtgcgcttcgccagcaccagatccaccggcgtcgaaaacagcggggctggccccaccagcttcaagaccatgaaggtcatcgacccccagcacagcgacaagcccaacgtgctgatcctgggctctggctggggcgccatcagctttctgaagcacatcgacaccaagaagtacaacgtcagcatcatcagccccagaagctacttcctgttcacccccctgctgcccagcgcccctgtgggaaccgtggacgagaagtccatcatcgagcccatcgtgaacttcgccctgaagaaaaagggcaacgtcacctactacgaggccgaggccaccagcatcaaccccgaccggaacaccgtgaccatcaagagcctgagcgccgtgtcccagctgttccagcccgagaaccacctgggcctgcaccaggccgagcccgccgagattaagtacgactacctgatcagcgccgtgggcgccgagcccaacacctttggaatccccggcgtgaccgactacggccacttcctgaaagagatccccaacagcctggaaatccggcggaccttcgccgccaacctggaaaaggccaacctgctgcctaagggcgaccccgagcggagaaggctgctgagcatcgtggtcgtgggcggaggccccacaggcgtggaagctgctggcgagctgcaggactacgtgcaccaggacctgcggaagttcctgcccgccctggccgaggaagtgcagattcacctggtggaagccctgcccatcgtgctgaacatgttcgagaagaagctgagcagctacgcccagagccacctggaaaacacctccatcaaggtgcacctgagaaccgccgtggccaaggtggaagagaagcagctgctggccaagaccaagcacgaggacggcaagattaccgaggaaaccatcccctacggcaccctgatttgggccaccggcaacaaggccagacccgtgatcaccgacctgttcaagaagatccccgagcagaacagcagcaagcggggcctggccgtgaacgacttcctgcaggtcaaaggcagcaacaacatcttcgccatcggcgacaacgcctttgccggcctgcctcctacagcccaggtggcccaccaggaagccgagtacctggccaagaacttcgacaagatggcccagatccccaatttccagaagaacctgtcctcccggaaggataagatcgacctgctgttcgaggaaaacaacttcaagcccttcaagtacaacgacctgggcgccctggcctacctgggcagcgaaagagccattgccaccatcagaagcggcaagcggaccttctacaccggcggaggcctgatgaccttctacctgtggcggatcctgtacctgagcatgatcctgagcgcccgcagcagactgaaggtgttcttcgactggatcaagctggccttcttcaagagggacttcttcaagggcctgtga

SEQ ID NO: 579 - DNA, 1542 bp, Artificial Sequence
  source: /note="Description of Artificial Sequence: Synthetic polynucleotide"
atgctgagcaagaacctgtacagcaacaagcggctgctgaccagcaccaacaccctcgtgcgcttcgccagcaccagatccaccggcgtcgaaaacagcggggctggccccaccagcttcaagaccatgaaggtcatcgacccccagcacagcgacaagcccaacgtgctgatcctgggctctggctggggcgccatcagctttctgaagcacatcgacaccaagaagtacaacgtcagcatcatcagccccagaagctacttcctgttcacccccctgctgcccagcgcccctgtgggaaccgtggacgagaagtccatcatcgagcccatcgtgaacttcgccctgaagaaaaagggcaacgtcacctactacgaggccgaggccaccagcatcaaccccgaccggaacaccgtgaccatcaagagcctgagcgccgtgtcccagctgtaccagcccgagaaccacctgggcctgcaccaggccgagcccgccgagattaagtacgactacctgatcagcgccgtgggcgccgagcccaacacctttggaatccccggcgtgaccgactacggccacttcctgaaagagatccccaacagcctggaaatccggcggaccttcgccgccaacctggaaaaggccaacctgctgcctaagggcgaccccgagcggagaaggctgctgagcatcgtggtcgtgggcggaggccccacaggcgtggaagctgctggcgagctgcaggactacgtgcaccaggacctgcggaagttcctgcccgccctggccgaggaagtgcagattcacctggtggaagccctgcccatcgtgctgaacatgttcgagaagaagctgagcagctacgcccagagccacctggaaaacacctccatcaaggtgcacctgagaaccgccgtggccaaggtggaagagaagcagctgctggccaagaccaagcacgaggacggcaagattaccgaggaaaccatcccctacggcaccctgatttgggccaccggcaacaaggccagacccgtgatcaccgacctgttcaagaagatccccgagcagaacagcagcaagcggggcctggccgtgaacgacttcctgcaggtcaaaggcagcaacaacatcttcgccatcggcgacaacgcctttgccggcctgcctcctacagcccaggtggcccaccaggaagccgagtacctggccaagaacttcgacaagatggcccagatccccaatttccagaagaacctgtcctcccggaaggataagatcgacctgctgttcgaggaaaacaacttcaagcccttcaagtacaacgacctgggcgccctggcctacctgggcagcgaaagagccattgccaccatcagaagcggcaagcggaccttctacaccggcggaggcctgatgaccttctacctgtggcggatcctgttcctgagcatgatcctgagcgcccgcagcagactgaaggtgttcttcgactggatcaagctggccttcttcaagagggacttcttcaagggcctgtga

SEQ ID NO: 580 - DNA, 1542 bp, Artificial Sequence
  source: /note="Description of Artificial Sequence: Synthetic polynucleotide"
atgctgagcaagaacctgtacagcaacaagcggctgctgaccagcaccaacaccctcgtgcgcttcgccagcaccagatccaccggcgtcgaaaacagcggggctggccccaccagcttcaagaccatgaaggtcatcgacccccagcacagcgacaagcccaacgtgctgatcctgggctctggctggggcgccatcagctttctgaagcacatcgacaccaagaagtacaacgtcagcatcatcagccccagaagctacttcctgttcacccccctgctgcccagcgcccctgtgggaaccgtggacgagaagtccatcatcgagcccatcgtgaacttcgccctgaagaaaaagggcaacgtcacctactacgaggccgaggccaccagcatcaaccccgaccggaacaccgtgaccatcaagagcctgagcgccgtgtcccagctgtaccagcccgagaaccacctgggcctgcaccaggccgagcccgccgagattaagtacgactacctgatcagcgccgtgggcgccgagcccaacacctttggaatccccggcgtgaccgactacggccacttcctgaaagagatccccaacagcctggaaatccggcggaccttcgccgccaacctggaaaaggccaacctgctgcctaagggcgaccccgagcggagaaggctgctgagcatcgtggtcgtgggcggaggccccacaggcgtggaagctgctggcgagctgcaggactacgtgcaccaggacctgcggaagttcctgcccgccctggccgaggaagtgcagattcacctggtggaagccctgcccatcgtgctgaacatgttcgagaagaagctgagcagctacgcccagagccacctggaaaacacctccatcaaggtgcacctgagaaccgccgtggccaaggtggaagagaagcagctgctggccaagaccaagcacgaggacggcaagattaccgaggaaaccatcccctacggcaccctgatttgggccaccggcaacaaggccagacccgtgatcaccgacctgttcaagaagatccccgagcagaacagcagcaagcggggcctggccgtgaacgacttcctgcaggtcaaaggcagcaacaacatcttcgccatcggcgacaacgcctttgccggcctgcctcctacagcccaggtggcccaccaggaagccgagtacctggccaagaacttcgacaagatggcccagatccccaatttccagaagaacctgtcctcccggaaggataagatcgacctgctgttcgaggaaaacaacttcaagcccttcaagtacaacgacctgggcgccctggcctacctgggcagcgaaagagccattgccaccatcagaagcggcaagcggaccttctacaccggcggaggcctgatgaccttctacctgtggcggatcctgtacctgagcatgatcctgaccgcccgcagcagactgaaggtgttcttcgactggatcaagctggccttcttcaagagggacttcttcaagggcctgtga

SEQ ID NO: 581 - DNA, 1542 bp, Artificial Sequence
  source: /note="Description of Artificial Sequence: Synthetic polynucleotide"
atgctgagcaagaacctgtacagcaacaagcggctgctgaccagcaccaacaccctcgtgcgcttcgccagcaccagatccaccggcgtcgaaaacagcggggctggccccaccagcttcaagaccatgaaggtcatcgacccccagcacagcgacaagcccaacgtgctgatcctgggctctggctggggcgccatcagctttctgaagcacatcgacaccaagaagtacaacgtcaccatcatcagccccagaagctacttcctgttcacccccctgctgcccagcgcccctgtgggaaccgtggacgagaagtccatcatcgagcccatcgtgaacttcgccctgaagaaaaagggcaacgtcacctactacgaggccgaggccaccagcatcaaccccgaccggaacaccgtgaccatcaagagcctgagcgccgtgtcccagctgtaccagcccgagaaccacctgggcctgcaccaggccgagcccgccgagattaagtacgactacctgatcagcgccgtgggcgccgagcccaacacctttggaatccccggcgtgaccgactacggccacttcctgaaagagatccccaacagcctggaaatccggcggaccttcgccgccaacctggaaaaggccaacctgctgcctaagggcgaccccgagcggagaaggctgctgagcatcgtggtcgtgggcggaggccccacaggcgtggaagctgctggcgagctgcaggactacgtgcaccaggacctgcggaagttcctgcccgccctggccgaggaagtgcagattcacctggtggaagccctgcccatcgtgctgaacatgttcgagaagaagctgagcagctacgcccagagccacctggaaaacacctccatcaaggtgcacctgagaaccgccgtggccaaggtggaagagaagcagctgctggccaagaccaagcacgaggacggcaagattaccgaggaaaccatcccctacggcaccctgatttgggccaccggcaacaaggccagacccgtgatcaccgacctgttcaagaagatccccgagcagaacagcagcaagcggggcctggccgtgaacgacttcctgcaggtcaaaggcagcaacaacatcttcgccatcggcgacaacgcctttgccggcctgcctcctacagcccaggtggcccaccaggaagccgagtacctggccaagaacttcgacaagatggcccagatccccaatttccagaagaacctgtcctcccggaaggataagatcgacctgctgttcgaggaaaacaacttcaagcccttcaagtacaacgacctgggcgccctggcctacctgggcagcgaaagagccattgccaccatcagaagcggcaagcggaccttctacaccggcggaggcctgatgaccttctacctgtggcggatcctgtacctgagcatgatcctgagcgcccgcagcagactgaaggtgttcttcgactggatcaagctggccttcttcaagagggacttcttcaagggcctgtga

SEQ ID NO: 582 - DNA, 1542 bp, Artificial Sequence
  source: /note="Description of Artificial Sequence: Synthetic polynucleotide"
atgctgagcaagaacctgtacagcaacaagcggctgctgaccagcaccaacaccctcgtgcgcttcgccagcaccagatccaccggcgtcgaaaacagcggggctggccccaccagcttcaagaccatgaaggtcatcgacccccagcacagcgacaagcccaacgtgctgatcctgggctctggctggggcgccatcagctttctgaagcacatcgacaccaagaagtacaacgtcagcatcatcagccccagaagctacttcctgttcacccccctgctgcccagcgcccctgtgggaaccgtggacgagaagtccatcatcgagcccatcgtgaacttcgccctgaagaaaaagggcaacgtcacctactacgaggccgaggccaccagcatcaaccccgaccggaacaccgtgaccatcaagagcctgagcgccgtgtcccagctgtaccagcccgagaaccacctgggcctgcaccaggccgagcccgccgagattaagtacgactacctgatcagcgccgtgggcgccgagcccaacacctttggaatccccggcgtgaccgactacggccacttcctggaggagatccccaacagcctggaaatccggcggaccttcgccgccaacctggaaaaggccaacctgctgcctaagggcgaccccgagcggagaaggctgctgagcatcgtggtcgtgggcggaggccccacaggcgtggaagctgctggcgagctgcaggactacgtgcaccaggacctgcggaagttcctgcccgccctggccgaggaagtgcagattcacctggtggaagccctgcccatcgtgctgaacatgttcgagaagaagctgagcagctacgcccagagccacctggaaaacacctccatcaaggtgcacctgagaaccgccgtggccaaggtggaagagaagcagctgctggccaagaccaagcacgaggacggcaagattaccgaggaaaccatcccctacggcaccctgatttgggccaccggcaacaaggccagacccgtgatcaccgacctgttcaagaagatccccgagcagaacagcagcaagcggggcctggccgtgaacgacttcctgcaggtcaaaggcagcaacaacatcttcgccatcggcgacaacgcctttgccggcctgcctcctacagcccaggtggcccaccaggaagccgagtacctggccaagaacttcgacaagatggcccagatccccaatttccagaagaacctgtcctcccggaaggataagatcgacctgctgttcgaggaaaacaacttcaagcccttcaagtacaacgacctgggcgccctggcctacctgggcagcgaaagagccattgccaccatcagaagcggcaagcggaccttctacaccggcggaggcctgatgaccttctacctgtggcggatcctgtacctgagcatgatcctgagcgcccgcagcagactgaaggtgttcttcgactggatcaagctggccttcttcaagagggacttcttcaagggcctgtga

SEQ ID NO: 583 - DNA, 1542 bp, Artificial Sequence
  source: /note="Description of Artificial Sequence: Synthetic polynucleotide"
atgctgagcaagaacctgtacagcaacaagcggctgctgaccagcaccaacaccctcgtgcgcttcgccagcaccagatccaccggcgtcgaaaacagcggggctggccccaccagcttcaagaccatgaagatcatcgacccccagcacagcgacaagcccaacgtgctgatcctgggctctggctggggcgccatcagctttctgaagcacatcgacaccaagaagtacaacgtcagcatcatcagccccagaagctacttcctgttcacccccctgctgcccagcgcccctgtgggaaccgtggacgagaagtccatcatcgagcccatcgtgaacttcgccctgaagaaaaagggcaacgtcacctactacgaggccgaggccaccagcatcaaccccgaccggaacaccgtgaccatcaagagcctgagcgccgtgtcccagctgtaccagcccgagaaccacctgggcctgcaccaggccgagcccgccgagattaagtacgactacctgatcagcgccgtgggcgccgagcccaacacctttggaatccccggcgtgaccgactacggccacttcctgaaagagatccccaacagcctggaaatccggcggaccttcgccgccaacctggaaaaggccaacctgctgcctaagggcgaccccgagcggagaaggctgctgagcatcgtggtcgtgggcggaggccccacaggcgtggaagctgctggcgagctgcaggactacgtgcaccaggacctgcggaagttcctgcccgccctggccgaggaagtgcagattcacctggtggaagccctgcccatcgtgctgaacatgttcgagaagaagctgagcagctacgcccagagccacctggaaaacacctccatcaaggtgcacctgagaaccgccgtggccaaggtggaagagaagcagctgctggccaagaccaagcacgaggacggcaagattaccgaggaaaccatcccctacggcaccctgatttgggccaccggcaacaaggccagacccgtgatcaccgacctgttcaagaagatccccgagcagaacagcagcaagcggggcctggccgtgaacgacttcctgcaggtcaaaggcagcaacaacatcttcgccatcggcgacaacgcctttgccggcctgcctcctacagcccaggtggcccaccaggaagccgagtacctggccaagaacttcgacaagatggcccagatccccaatttccagaagaacctgtcctcccggaaggataagatcgacctgctgttcgaggaaaacaacttcaagcccttcaagtacaacgacctgggcgccctggcctacctgggcagcgaaagagccattgccaccatcagaagcggcaagcggaccttctacaccggcggaggcctgatgaccttctacctgtggcggatcctgtacctgagcatgatcctgagcgcccgcagcagactgaaggtgttcttcgactggatcaagctggccttcttcaagagggacttcttcaagggcctgtga

SEQ ID NO: 584 - DNA, 1542 bp, Artificial Sequence
  source: /note="Description of Artificial Sequence: Synthetic polynucleotide"
atgctgagcaagaacctgtacagcaacaagcggctgctgaccagcaccaacaccctcgtgcgcttcgccagcaccagatccaccggcgtcgaaaacagcggggctggccccaccagcttcaagaccatgaaggtcatcgacccccagcacagcgacaagcccaacgtgctgatcctgggctctggctggggcgccatcagctttctgaagcacatcgacaccaagaagtacaacgtcagcatcatcagccccagaagctacttcctgttcacccccctgctgcccagcgcccctgtgggaaccgtggacgagaagtccatcatcgagcccatcgtgaacttcgccctgaagaaaaagggcaacgtcacctactacgaggccgaggccaccagcatcaaccccgaccggaacaccgtgaccatcaagagcctgagcgccgtgtcccagctgtaccagcccgagaaccacctgggcctgcaccaggccgagcccgccgagattaagtacgactacctgatcagcgccgtgggcgccgagcccaacacctttggaatccccggcgtgaccgactacggccacttcctgaaagagatccccaacagcctggaaatccggcggaccttcgccgccaacctggaaaaggccaacctgctgcctaagggcgaccccgagcggagaaggctgctgagcatcgtggtcgtgggcggaggccccacaggcgtggaagctgctggcgagctgcaggactacgtgcaccaggacctgcggaagttcctgcccgccctggccgaggaagtgcagattcacctggtggaagccctgcccatcgtgctgaacatgttcgagaagaagctgagcagctacgcccagagccacctggaaaacacctccatcaaggtgcacctgagaaccgccgtggccaaggtggaagagaagcagctgctggccaagaccaagcacgaggacggcaagattaccgaggaaaccatcccctacggcaccctgatttgggccaccggcaacaaggccagacccgtgatcaccgacctgttcaagaagatccccgagcagaacagcagcaagcggggcctggccgtgaacgacttcctgcaggtcaaaggcagcaacaacatcttcgccatcggcgacaacgcctttgccggcctgcctcctacagcccaggtggcccaccaggaagccgagtacctggccaagaacttcgacaagatggcccagatccccaatttccagaagaacctgtcctcccggaaggataagatcgacctgctgttcgaggaaaacaacttcaagcccttcaagtacaacgacctgggcgccctggcctacctgggcagcgaaagagccattgccaccatcagaagcggcaagcggaccttctacaccggcggaggcctgatgaccttctacctgtggcggatcctgtacatgagcatgatcctgagcgcccgcagcagactgaaggtgttcttcgactggatcaagctggccttcttcaagagggacttcttcaagggcctgtga

SEQ ID NO: 585 - DNA, 1542 bp, Artificial Sequence
  source: /note="Description of Artificial Sequence: Synthetic polynucleotide"
atgctatcgaagaatttgtatagtaacaagaggttgctcacctcgacgaatacgctagtcagattcgcttccaccagatccacaggggtggaaaactccggagcaggtcctacatcttttaagaccatgaaagtcattgaccctcagcacagcgacaaaccaaacgtgctgatactgggttcggggtggggagctatttcgtttttaaagcacattgacaccaagaagtacaacgtttccatcgtgtctcctagaagctatttcttatacacgcctttgttaccttctgcaccagttgggacagtagacgaaaagtcaattattgagcccatcgttaattttgctctcaagaaaaaggggaacgttacctactatgaggcagaagccacctctatcaatcccgacaggaataccgttaccataaaatcattatctgccgttagccagctataccaacctgaaaaccatctagggctgcatcaagcagaacctgctgaaattaagtacgattatttaatcagtgctgtaggtgcggaacctaacacatttggtattcctggggtcactgattacggtcatttcctgaaggaaattcccaactctttggaaataagaagaacttttgccgccaatctagagaaggctaacttattgccaaagggtgatcccgaaagaagaagactactgtccattgtcgtggttggtggtgggcctactggtgtagaggccgctggtgaactacaggattatgttcaccaggacctgagaaagtttctccctgcattggccgaagaagtccaaattcacttggtcgaagctctgcccatcgttttgaatatgtttgagaaaaagctttcatcatacgcgcaatcacatttagaaaacacttcgatcaaagtacatctgagaacggctgtcgccaaagttgaagaaaagcaattgttggcaaagacgaaacacgaagacggtaaaataaccgaagaaactattccatacggtactttgatttgggccacgggtaacaaggcaagaccggtaatcacagaccttttcaagaaaattcctgagcaaaactcgtccaagagaggattggcagtgaatgactttttgcaagtgaaaggcagcaacaacattttcgccattggtgacaatgcatttgctgggttgccaccaaccgcccaagtggcgcaccaagaggccgaatatttggccaagaattttgataaaatggctcaaataccaaatttccaaaagaatctatcttcaagaaaggataaaattgatctcttgttcgaggagaacaactttaaacctttcaaatacaacgatttaggtgccttagcatacctgggatccgaaagggccattgcaaccatacgttccggtaagagaacattttacaccggtggtggcttaatgaccttctacttatggagaattttgtacttgtccatgattctatctgcaagatcgagattaaaggtctttttcgactggattaaattagcatttttcaaaagagacttttttaaaggattatag

SEQ ID NO: 586 - DNA, 1542 bp, Artificial Sequence
  source: /note="Description of Artificial Sequence: Synthetic polynucleotide"
atgctatcgaagaatttgtatagtaacaagaggttgctcacctcgacgaatacgctagtcagattcgcttccaccagatccacaggggtggaaaactccggagcaggtcctacatcttttaagaccatgaaagtcattgaccctcagcacagcgacaaaccaaacgtgctgatactgggttcggggtggggagctatttcgtttttaaagcacattgacaccaagaagtacaacgtttccatcgtgtctcctagaagctatttcatctttacgcctttgttaccttctgcaccagttgggacagtagacgaaaagtcaattattgagcccatcgttaattttgctctcaagaaaaaggggaacgttacctactatgaggcagaagccacctctatcaatcccgacaggaataccgttaccataaaatcattatctgccgttagccagctataccaacctgaaaaccatctagggctgcatcaagcagaacctgctgaaattaagtacgattatttaatcagtgctgtaggtgcggaacctaacacatttggtattcctggggtcactgattacggtcatttcctgaaggaaattcccaactctttggaaataagaagaacttttgccgccaatctagagaaggctaacttattgccaaagggtgatcccgaaagaagaagactactgtccattgtcgtggttggtggtgggcctactggtgtagaggccgctggtgaactacaggattatgttcaccaggacctgagaaagtttctccctgcattggccgaagaagtccaaattcacttggtcgaagctctgcccatcgttttgaatatgtttgagaaaaagctttcatcatacgcgcaatcacatttagaaaacacttcgatcaaagtacatctgagaacggctgtcgccaaagttgaagaaaagcaattgttggcaaagacgaaacacgaagacggtaaaataaccgaagaaactattccatacggtactttgatttgggccacgggtaacaaggcaagaccggtaatcacagaccttttcaagaaaattcctgagcaaaactcgtccaagagaggattggcagtgaatgactttttgcaagtgaaaggcagcaacaacattttcgccattggtgacaatgcatttgctgggttgccaccaaccgcccaagtggcgcaccaagaggccgaatatttggccaagaattttgataaaatggctcaaataccaaatttccaaaagaatctatcttcaagaaaggataaaattgatctcttgttcgaggagaacaactttaaacctttcaaatacaacgatttaggtgccttagcatacctgggatccgaaagggccattgcaaccatacgttccggtaagagaacattttacaccggtggtggcttaatgaccttctacttatggagaattttgtacttgtccatgattctatctgcaagatcgagattaaaggtctttttcgactggattaaattagcatttttcaaaagagacttttttaaaggattatag

SEQ ID NO: 587 - DNA, 1542 bp, Artificial Sequence
  source: /note="Description of Artificial Sequence: Synthetic polynucleotide"
atgctatcgaagaatttgtatagtaacaagaggttgctcacctcgacgaatacgctagtcagattcgcttccaccagatccacaggggtggaaaactccggagcaggtcctacatcttttaagaccatgaaagtcattgaccctcagcacagcgacaaaccaaacgtgctgatactgggttcggggtggggagctatttcgtttttaaagcacattgacaccaagaagtacaacgtttccatcgtgtctcctagaagctatttcttatttacgcctttgttaccttctgcaccagttgggacagtagacgaaaagtcaattattgagcccatcgttaattttgctctcaagaaaaaggggaacgttacctactatgaggcagaagccacctctatcaatcccgacaggaataccgttaccataaaatcattatctgccgttagccagctataccaacctgaaaaccatctagggctgcatcaagcagaacctgctgaaattaagtacgattatttaatcagtgctgtaggtgcggaacctaacacatttggtattcctggggtcactgattacggtcatttcctgaaggaaattcccaactctttggaaataagaagaacttttgccgccaatctagagaaggctaacttattgccaaagggtgatcccgaaagaagaagactactgtccattgtcgtggttggtggtgggcctactggtgtagaggccgctggtgaactacaggattatgttcaccaggacctgagaaagtttctccctgcattggccgaagaaatccaaattcacttggtcgaagctctgcccatcgttttgaatatgtttgagaaaaagctttcatcatacgcgcaatcacatttagaaaacacttcgatcaaagtacatctgagaacggctgtcgccaaagttgaagaaaagcaattgttggcaaagacgaaacacgaagacggtaaaataaccgaagaaactattccatacggtactttgatttgggccacgggtaacaaggcaagaccggtaatcacagaccttttcaagaaaattcctgagcaaaactcgtccaagagaggattggcagtgaatgactttttgcaagtgaaaggcagcaacaacattttcgccattggtgacaatgcatttgctgggttgccaccaaccgcccaagtggcgcaccaagaggccgaatatttggccaagaattttgataaaatggctcaaataccaaatttccaaaagaatctatcttcaagaaaggataaaattgatctcttgttcgaggagaacaactttaaacctttcaaatacaacgatttaggtgccttagcatacctgggatccgaaagggccattgcaaccatacgttccggtaagagaacattttacaccggtggtggcttaatgaccttctacttatggagaattttgtacttgtccatgattctatctgcaagatcgagattaaaggtctttttcgactggattaaattagcatttttcaaaagagacttttttaaaggattatag

SEQ ID NO: 588 - DNA, 1542 bp, Artificial Sequence
  source: /note="Description of Artificial Sequence: Synthetic polynucleotide"
atgctatcgaagaatttgtatagtaacaagaggttgctcacctcgacgaatacgctagtcagattcgcttccaccagatccacaggggtggaaaactccggagcaggtcctacatcttttaagaccatgaaagtcattgaccctcagcacagcgacaaaccaaacgtgctgatactgggttcggggtggggagctatttcgtttttaaagcacattgacaccaagaagtacaacgtttccatcgtgtctcctagaagctatttcttatttacgcctttgttaccttctgcaccagttgggacagtagacgaaaagtcaattattgagcccatcgttaattttgctctcaagaaaaaggggaacgttacctactatgaggcagaagccacctctatcaatcccgacaggaataccgttaccataaaatcattatctgccgttagccagctataccaacctgaaaaccatctagggctgcatcaagcagaacctgctgaaattaagtacgattatttaatcagtgctgtaggtgcggaacctaacacatttggtattcctggggtcactgattacggtcatttcctgaaggaaattcccaactctttggaaataagaagaacttttgccgccaatctagagaaggctaacttattgccaaagggtgatcccgaaagaagaagactactgtccattgtcgtggttggtggtgggcctactggtgtagaggccgctggtgaactacaggattatgttcaccaggacctgagaaagtttctccctgcattggccgaagaagtccaaattcacttggtcgaagctctgcccatcgttttgaatatgtttgagaaaaagctttcatcatacgcgcaatcacatttagaaaacacttcgatcaaagtacatctgagaacggctgtcgccaaagttgaagaaaagcaattgttggcaaagacgaaacacgaagacggtaaaataaccgaagaaactattccatacggtactttgatttgggccacgggtaacaaggcaagaccggtaatcacagaccttttcaagaaaattcctgagcaaaactcgtccaagagaggattggcagtgaatgactttttgcaagtgaaaggcagcaacaacattttcgccattggtgacaatgcatttgctgggttgccaccaaccgcccaagtggcgcaccaagaggccgaatatttggccaagaattttgataaaatggctcaaataccaaatttccaaaagaatctatcttcaagaaaggataaaattgatctcttgttcgaggagaacaactttaaacctttcaaatacaacgatttaggtgccttagcatacctgggatccgaaagggccattgcaaccatacgttccggtaagagaacattttacaccggtggtggcttaatgaccttctacttatggagaattttgtacatgtccatgattctatctgcaagatcgagattaaaggtctttttcgactggattaaattagcatttttcaaaagagacttttttaaaggattatag

SEQ ID NO: 589 - DNA, 1542 bp, Artificial Sequence
  source: /note="Description of Artificial Sequence: Synthetic polynucleotide"
atgctatcgaagaatttgtatagtaacaagaggttgctcacctcgacgaatacgctagtcagattcgcttccaccagatccacaggggtggaaaactccggagcaggtcctacatcttttaagaccatgaaagtcattgaccctcagcacagcgacaaaccaaacgtgctgatactgggttcggggtggggagctatttcgtttttaaagcacattgacaccaagaagtacaacgtttccatcgtgtctcctagaagctatttcttatttacgcctttgttaccttctgcaccagttgggacagtagacgaaaagtcaattattgagcccatcgttaattttgctctcaagaaaaaggggaacgttacctactatgaggcagaagccacctctatcaatcccgacaggaataccgttaccataaaatcattatctgccgttagccagctataccaacctgaaaaccatctagggctgcatcaagcagaacctgctgaaattaagtacgattatttaatcagtgctgtaggtgcggaacctaacacatttggtattcctggggtcactgattacggtcatttcctgaaggaaattcccaactctttggaaataagaagaacttttgccgccaatctagagaaggctaacttattgccaaagggtgatcccgaaagaagaagactactgtccattgtcgtggttggtggtgggcctactggtgtagaggccgctggtgaactacaggattatgttcaccaggacctgagaaagtttctccctgcattggccgaagaagtccaaattcacttggtcgaagctctgcccatcgttttgaatatgtttgagaaaaagctttcatcatacgcgcaatcacatttagaaaacacttcgatcaaagtacatctgagaacggctgtcgccaaagttgaagaaaagcaattgttggcaaagacgaaacacgaagacggtaaaataaccgaagaaactattccatacggtactttgatttgggccacgggtaacaaggcaagaccggtaatcacagaccttttcaagaaaattcctgagcaaaactcgtccaagagaggattggcagtgaatgactttttgcaagtgaaaggcagcaacaacattttcgccattggtgacaatgcatttgctgggttgccaccaaccgcccaagtggcgcaccaagaggccgaatatttggccaagaattttgataaaatggctcaaataccaaatttccaaaagaatctatcttcaagaaaggataaaattgatctcttgttcgaggagaacaactttaaacctttcaaatacaacgatttaggtgccttagcatacctgggatccgaaagggccattgcaaccatacgttccggtaagagaacattttacaccggtggtggcttaatgaccttctacttatggagaattatctacttgtccatgattctatctgcaagatcgagattaaaggtctttttcgactggattaaattagcatttttcaaaagagacttttttaaaggattatag

SEQ ID NO: 590 - DNA, 1542 bp, Artificial Sequence
  source: /note="Description of Artificial Sequence: Synthetic polynucleotide"
atgctatcgaagaatttgtatagtaacaagaggttgctcacctcgacgaatacgctagtcagattcgcttccaccagatccacaggggtggaaaactccggagcaggtcctacatcttttaagaccatgaaaatcattgaccctcagcacagcgacaaaccaaacgtgctgatactgggttcggggtggggagctatttcgtttttaaagcacattgacaccaagaagtacaacgtttccatcgtgtctcctagaagctatttcttatttacgcctttgttaccttctgcaccagttgggacagtagacgaaaagtcaattattgagcccatcgttaattttgctctcaagaaaaaggggaacgttacctactatgaggcagaagccacctctatcaatcccgacaggaataccgttaccataaaatcattatctgccgttagccagctataccaacctgaaaaccatctagggctgcatcaagcagaacctgctgaaattaagtacgattatttaatcagtgctgtaggtgcggaacctaacacatttggtattcctggggtcactgattacggtcatttcctgaaggaaattcccaactctttggaaataagaagaacttttgccgccaatctagagaaggctaacttattgccaaagggtgatcccgaaagaagaagactactgtccattgtcgtggttggtggtgggcctactggtgtagaggccgctggtgaactacaggattatgttcaccaggacctgagaaagtttctccctgcattggccgaagaagtccaaattcacttggtcgaagctctgcccatcgttttgaatatgtttgagaaaaagctttcatcatacgcgcaatcacatttagaaaacacttcgatcaaagtacatctgagaacggctgtcgccaaagttgaagaaaagcaattgttggcaaagacgaaacacgaagacggtaaaataaccgaagaaactattccatacggtactttgatttgggccacgggtaacaaggcaagaccggtaatcacagaccttttcaagaaaattcctgagcaaaactcgtccaagagaggattggcagtgaatgactttttgcaagtgaaaggcagcaacaacattttcgccattggtgacaatgcatttgctgggttgccaccaaccgcccaagtggcgcaccaagaggccgaatatttggccaagaattttgataaaatggctcaaataccaaatttccaaaagaatctatcttcaagaaaggataaaattgatctcttgttcgaggagaacaactttaaacctttcaaatacaacgatttaggtgccttagcatacctgggatccgaaagggccattgcaaccatacgttccggtaagagaacattttacaccggtggtggcttaatgaccttctacttatggagaattttgtacttgtccatgattctatctgcaagatcgagattaaaggtctttttcgactggattaaattagcatttttcaaaagagacttttttaaaggattatag

SEQ ID NO: 591 - DNA, 1542 bp, Artificial Sequence
  source: /note="Description of Artificial Sequence: Synthetic polynucleotide"
atgctatcgaagaatttgtatagtaacaagaggttgctcacctcgacgaatacgctagtcagattcgcttccaccagatccacaggggtggaaaactccggagcaggtcctacatcttttaagaccatgaaagtcattgaccctcagcacagcgacaaaccaaacgtgctgatactgggttcggggtggggagctatttcgtttttaaagcacattgacaccaagaagtacaacgtttccatcatctctcctagaagctatttcatctacacgcctttgttaccttctgcaccagttgggacagtagacgaaaagtcaattattgagcccatcgttaattttgctctcaagaaaaaggggaacgttacctactatgaggcagaagccacctctatcaatcccgacaggaataccgttaccataaaatcattatctgccgttagccagctataccaacctgaaaaccatctagggctgcatcaagcagaacctgctgaaattaagtacgattatttaatcagtgctgtaggtgcggaacctaacacatttggtattcctggggtcactgattacggtcatttcctgaaggaaattcccaactctttggaaataagaagaacttttgccgccaatctagagaaggctaacttattgccaaagggtgatcccgaaagaagaagactactgtccattgtcgtggttggtggtgggcctactggtgtagaggccgctggtgaactacaggattatgttcaccaggacctgagaaagtttctccctgcattggccgaagaagtccaaattcacttggtcgaagctctgcccatcgttttgaatatgtttgagaaaaagctttcatcatacgcgcaatcacatttagaaaacacttcgatcaaagtacatctgagaacggctgtcgccaaagttgaagaaaagcaattgttggcaaagacgaaacacgaagacggtaaaataaccgaagaaactattccatacggtactttgatttgggccacgggtaacaaggcaagaccggtaatcacagaccttttcaagaaaattcctgagcaaaactcgtccaagagaggattggcagtgaatgactttttgcaagtgaaaggcagcaacaacattttcgccattggtgacaatgcatttgctgggttgccaccaaccgcccaagtggcgcaccaagaggccgaatatttggccaagaattttgataaaatggctcaaataccaaatttccaaaagaatctatcttcaagaaaggataaaattgatctcttgttcgaggagaacaactttaaacctttcaaatacaacgatttaggtgccttagcatacctgggatccgaaagggccattgcaaccatacgttccggtaagagaacattttacaccggtggtggcttaatgaccttctacttatggagaattttgtacttgtccatgattctatctgcaagatcgagattaaaggtctttttcgactggattaaattagcatttttcaaaagagacttttttaaaggattatag

SEQ ID NO: 592 - DNA, 1542 bp, Artificial Sequence
  source: /note="Description of Artificial Sequence: Synthetic polynucleotide"
atgctatcgaagaatttgtatagtaacaagaggttgctcacctcgacgaatacgctagtcagattcgcttccaccagatccacaggggtggaaaactccggagcaggtcctacatcttttaagaccatgaaagtcattgaccctcagcacagcgacaaaccaaacgtgctgatactgggttcggggtggggagctatttcgtttttaaagcacattgacaccaagaagtacaacgtttccatcatctctcctagaagctatttcttatacacgcctttgttaccttctgcaccagttgggacagtagacgaaaagtcaattattgagcccatcgttaattttgctctcaagaaaaaggggaacgttacctactatgaggcagaagccacctctatcaatcccgacaggaataccgttaccataaaatcattatctgccgttagccagctataccaacctgaaaaccatctagggctgcatcaagcagaacctgctgaaattaagtacgattatttaatcagtgctgtaggtgcggaacctaacacatttggtattcctggggtcactgattacggtcatttcctgaaggaaattcccaactctttggaaataagaagaacttttgccgccaatctagagaaggctaacttattgccaaagggtgatcccgaaagaagaagactactgtccattgtcgtggttggtggtgggcctactggtgtagaggccgctggtgaactacaggattatgttcaccaggacctgagaaagtttctccctgcattggccgaagaaatccaaattcacttggtcgaagctctgcccatcgttttgaatatgtttgagaaaaagctttcatcatacgcgcaatcacatttagaaaacacttcgatcaaagtacatctgagaacggctgtcgccaaagttgaagaaaagcaattgttggcaaagacgaaacacgaagacggtaaaataaccgaagaaactattccatacggtactttgatttgggccacgggtaacaaggcaagaccggtaatcacagaccttttcaagaaaattcctgagcaaaactcgtccaagagaggattggcagtgaatgactttttgcaagtgaaaggcagcaacaacattttcgccattggtgacaatgcatttgctgggttgccaccaaccgcccaagtggcgcaccaagaggccgaatatttggccaagaattttgataaaatggctcaaataccaaatttccaaaagaatctatcttcaagaaaggataaaattgatctcttgttcgaggagaacaactttaaacctttcaaatacaacgatttaggtgccttagcatacctgggatccgaaagggccattgcaaccatacgttccggtaagagaacattttacaccggtggtggcttaatgaccttctacttatggagaattttgtacttgtccatgattctatctgcaagatcgagattaaaggtctttttcgactggattaaattagcatttttcaaaagagacttttttaaaggattatag

SEQ ID NO: 593 - DNA, 1542 bp, Artificial Sequence
  source: /note="Description of Artificial Sequence: Synthetic polynucleotide"
atgctatcgaagaatttgtatagtaacaagaggttgctcacctcgacgaatacgctagtcagattcgcttccaccagatccacaggggtggaaaactccggagcaggtcctacatcttttaagaccatgaaagtcattgaccctcagcacagcgacaaaccaaacgtgctgatactgggttcggggtggggagctatttcgtttttaaagcacattgacaccaagaagtacaacgtttccatcatctctcctagaagctatttcttatacacgcctttgttaccttctgcaccagttgggacagtagacgaaaagtcaattattgagcccatcgttaattttgctctcaagaaaaaggggaacgttacctactatgaggcagaagccacctctatcaatcccgacaggaataccgttaccataaaatcattatctgccgttagccagctataccaacctgaaaaccatctagggctgcatcaagcagaacctgctgaaattaagtacgattatttaatcagtgctgtaggtgcggaacctaacacatttggtattcctggggtcactgattacggtcatttcctgaaggaaattcccaactctttggaaataagaagaacttttgccgccaatctagagaaggctaacttattgccaaagggtgatcccgaaagaagaagactactgtccattgtcgtggttggtggtgggcctactggtgtagaggccgctggtgaactacaggattatgttcaccaggacctgagaaagtttctccctgcattggccgaagaagtccaaattcacttggtcgaagctctgcccatcgttttgaatatgtttgagaaaaagctttcatcatacgcgcaatcacatttagaaaacacttcgatcaaagtacatctgagaacggctgtcgccaaagttgaagaaaagcaattgttggcaaagacgaaacacgaagacggtaaaataaccgaagaaactattccatacggtactttgatttgggccacgggtaacaaggcaagaccggtaatcacagaccttttcaagaaaattcctgagcaaaactcgtccaagagaggattggcagtgaatgactttttgcaagtgaaaggcagcaacaacattttcgccattggtgacaatgcatttgctgggttgccaccaaccgcccaagtggcgcaccaagaggccgaatatttggccaagaattttgataaaatggctcaaataccaaatttccaaaagaatctatcttcaagaaaggataaaattgatctcttgttcgaggagaacaactttaaacctttcaaatacaacgatttaggtgccttagcatacctgggatccgaaagggccattgcaaccatacgttccggtaagagaacattttacaccggtggtggcttaatgaccttctacttatggagaattttgtacatgtccatgattctatctgcaagatcgagattaaaggtctttttcgactggattaaattagcatttttcaaaagagacttttttaaaggattatag

SEQ ID NO: 594 - DNA, 1542 bp, Artificial Sequence
  source: /note="Description of Artificial Sequence: Synthetic polynucleotide"
atgctatcgaagaatttgtatagtaacaagaggttgctcacctcgacgaatacgctagtcagattcgcttccaccagatccacaggggtggaaaactccggagcaggtcctacatcttttaagaccatgaaagtcattgaccctcagcacagcgacaaaccaaacgtgctgatactgggttcggggtggggagctatttcgtttttaaagcacattgacaccaagaagtacaacgtttccatcatctctcctagaagctatttcttatacacgcctttgttaccttctgcaccagttgggacagtagacgaaaagtcaattattgagcccatcgttaattttgctctcaagaaaaaggggaacgttacctactatgaggcagaagccacctctatcaatcccgacaggaataccgttaccataaaatcattatctgccgttagccagctataccaacctgaaaaccatctagggctgcatcaagcagaacctgctgaaattaagtacgattatttaatcagtgctgtaggtgcggaacctaacacatttggtattcctggggtcactgattacggtcatttcctgaaggaaattcccaactctttggaaataagaagaacttttgccgccaatctagagaaggctaacttattgccaaagggtgatcccgaaagaagaagactactgtccattgtcgtggttggtggtgggcctactggtgtagaggccgctggtgaactacaggattatgttcaccaggacctgagaaagtttctccctgcattggccgaagaagtccaaattcacttggtcgaagctctgcccatcgttttgaatatgtttgagaaaaagctttcatcatacgcgcaatcacatttagaaaacacttcgatcaaagtacatctgagaacggctgtcgccaaagttgaagaaaagcaattgttggcaaagacgaaacacgaagacggtaaaataaccgaagaaactattccatacggtactttgatttgggccacgggtaacaaggcaagaccggtaatcacagaccttttcaagaaaattcctgagcaaaactcgtccaagagaggattggcagtgaatgactttttgcaagtgaaaggcagcaacaacattttcgccattggtgacaatgcatttgctgggttgccaccaaccgcccaagtggcgcaccaagaggccgaatatttggccaagaattttgataaaatggctcaaataccaaatttccaaaagaatctatcttcaagaaaggataaaattgatctcttgttcgaggagaacaactttaaacctttcaaatacaacgatttaggtgccttagcatacctgggatccgaaagggccattgcaaccatacgttccggtaagagaacattttacaccggtggtggcttaatgaccttctacttatggagaattatctacttgtccatgattctatctgcaagatcgagattaaaggtctttttcgactggattaaattagcatttttcaaaagagacttttttaaaggattatag

SEQ ID NO: 595 - DNA, 1542 bp, Artificial Sequence
  source: /note="Description of Artificial Sequence: Synthetic polynucleotide"
atgctatcgaagaatttgtatagtaacaagaggttgctcacctcgacgaatacgctagtcagattcgcttccaccagatccacaggggtggaaaactccggagcaggtcctacatcttttaagaccatgaaaatcattgaccctcagcacagcgacaaaccaaacgtgctgatactgggttcggggtggggagctatttcgtttttaaagcacattgacaccaagaagtacaacgtttccatcatctctcctagaagctatttcttatacacgcctttgttaccttctgcaccagttgggacagtagacgaaaagtcaattattgagcccatcgttaattttgctctcaagaaaaaggggaacgttacctactatgaggcagaagccacctctatcaatcccgacaggaataccgttaccataaaatcattatctgccgttagccagctataccaacctgaaaaccatctagggctgcatcaagcagaacctgctgaaattaagtacgattatttaatcagtgctgtaggtgcggaacctaacacatttggtattcctggggtcactgattacggtcatttcctgaaggaaattcccaactctttggaaataagaagaacttttgccgccaatctagagaaggctaacttattgccaaagggtgatcccgaaagaagaagactactgtccattgtcgtggttggtggtgggcctactggtgtagaggccgctggtgaactacaggattatgttcaccaggacctgagaaagtttctccctgcattggccgaagaagtccaaattcacttggtcgaagctctgcccatcgttttgaatatgtttgagaaaaagctttcatcatacgcgcaatcacatttagaaaacacttcgatcaaagtacatctgagaacggctgtcgccaaagttgaagaaaagcaattgttggcaaagacgaaacacgaagacggtaaaataaccgaagaaactattccatacggtactttgatttgggccacgggtaacaaggcaagaccggtaatcacagaccttttcaagaaaattcctgagcaaaactcgtccaagagaggattggcagtgaatgactttttgcaagtgaaaggcagcaacaacattttcgccattggtgacaatgcatttgctgggttgccaccaaccgcccaagtggcgcaccaagaggccgaatatttggccaagaattttgataaaatggctcaaataccaaatttccaaaagaatctatcttcaagaaaggataaaattgatctcttgttcgaggagaacaactttaaacctttcaaatacaacgatttaggtgccttagcatacctgggatccgaaagggccattgcaaccatacgttccggtaagagaacattttacaccggtggtggcttaatgaccttctacttatggagaattttgtacttgtccatgattctatctgcaagatcgagattaaaggtctttttcgactggattaaattagcatttttcaaaagagacttttttaaaggattatag

SEQ ID NO: 596 - DNA, 1542 bp, Artificial Sequence
  source: /note="Description of Artificial Sequence: Synthetic polynucleotide"
atgctatcgaagaatttgtatagtaacaagaggttgctcacctcgacgaatacgctagtcagattcgcttccaccagatccacaggggtggaaaactccggagcaggtcctacatcttttaagaccatgaaagtcattgaccctcagcacagcgacaaaccaaacgtgctgatactgggttcggggtggggagctatttcgtttttaaagcacattgacaccaagaagtacaacgtttccatcatctctcctagaagctatttcatctttacgcctttgttaccttctgcaccagttgggacagtagacgaaaagtcaattattgagcccatcgttaattttgctctcaagaaaaaggggaacgttacctactatgaggcagaagccacctctatcaatcccgacaggaataccgttaccataaaatcattatctgccgttagccagctataccaacctgaaaaccatctagggctgcatcaagcagaacctgctgaaattaagtacgattatttaatcagtgctgtaggtgcggaacctaacacatttggtattcctggggtcactgattacggtcatttcctgaaggaaattcccaactctttggaaataagaagaacttttgccgccaatctagagaaggctaacttattgccaaagggtgatcccgaaagaagaagactactgtccattgtcgtggttggtggtgggcctactggtgtagaggccgctggtgaactacaggattatgttcaccaggacctgagaaagtttctccctgcattggccgaagaaatccaaattcacttggtcgaagctctgcccatcgttttgaatatgtttgagaaaaagctttcatcatacgcgcaatcacatttagaaaacacttcgatcaaagtacatctgagaacggctgtcgccaaagttgaagaaaagcaattgttggcaaagacgaaacacgaagacggtaaaataaccgaagaaactattccatacggtactttgatttgggccacgggtaacaaggcaagaccggtaatcacagaccttttcaagaaaattcctgagcaaaactcgtccaagagaggattggcagtgaatgactttttgcaagtgaaaggcagcaacaacattttcgccattggtgacaatgcatttgctgggttgccaccaaccgcccaagtggcgcaccaagaggccgaatatttggccaagaattttgataaaatggctcaaataccaaatttccaaaagaatctatcttcaagaaaggataaaattgatctcttgttcgaggagaacaactttaaacctttcaaatacaacgatttaggtgccttagcatacctgggatccgaaagggccattgcaaccatacgttccggtaagagaacattttacaccggtggtggcttaatgaccttctacttatggagaattttgtacttgtccatgattctatctgcaagatcgagattaaaggtctttttcgactggattaaattagcatttttcaaaagagacttttttaaaggattatag

SEQ ID NO: 597 - DNA, 1542 bp, Artificial Sequence
  source: /note="Description of Artificial Sequence: Synthetic polynucleotide"
atgctatcgaagaatttgtatagtaacaagaggttgctcacctcgacgaatacgctagtcagattcgcttccaccagatccacaggggtggaaaactccggagcaggtcctacatcttttaagaccatgaaagtcattgaccctcagcacagcgacaaaccaaacgtgctgatactgggttcggggtggggagctatttcgtttttaaagcacattgacaccaagaagtacaacgtttccatcatctctcctagaagctatttcatctttacgcctttgttaccttctgcaccagttgggacagtagacgaaaagtcaattattgagcccatcgttaattttgctctcaagaaaaaggggaacgttacctactatgaggcagaagccacctctatcaatcccgacaggaataccgttaccataaaatcattatctgccgttagccagctataccaacctgaaaaccatctagggctgcatcaagcagaacctgctgaaattaagtacgattatttaatcagtgctgtaggtgcggaacctaacacatttggtattcctggggtcactgattacggtcatttcctgaaggaaattcccaactctttggaaataagaagaacttttgccgccaatctagagaaggctaacttattgccaaagggtgatcccgaaagaagaagactactgtccattgtcgtggttggtggtgggcctactggtgtagaggccgctggtgaactacaggattatgttcaccaggacctgagaaagtttctccctgcattggccgaagaagtccaaattcacttggtcgaagctctgcccatcgttttgaatatgtttgagaaaaagctttcatcatacgcgcaatcacatttagaaaacacttcgatcaaagtacatctgagaacggctgtcgccaaagttgaagaaaagcaattgttggcaaagacgaaacacgaagacggtaaaataaccgaagaaactattccatacggtactttgatttgggccacgggtaacaaggcaagaccggtaatcacagaccttttcaagaaaattcctgagcaaaactcgtccaagagaggattggcagtgaatgactttttgcaagtgaaaggcagcaacaacattttcgccattggtgacaatgcatttgctgggttgccaccaaccgcccaagtggcgcaccaagaggccgaatatttggccaagaattttgataaaatggctcaaataccaaatttccaaaagaatctatcttcaagaaaggataaaattgatctcttgttcgaggagaacaactttaaacctttcaaatacaacgatttaggtgccttagcatacctgggatccgaaagggccattgcaaccatacgttccggtaagagaacattttacaccggtggtggcttaatgaccttctacttatggagaattttgtacatgtccatgattctatctgcaagatcgagattaaaggtctttttcgactggattaaattagcatttttcaaaagagacttttttaaaggattatag

SEQ ID NO: 598 - DNA, 1542 bp, Artificial Sequence
  source: /note="Description of Artificial Sequence: Synthetic polynucleotide"
atgctatcgaagaatttgtatagtaacaagaggttgctcacctcgacgaatacgctagtcagattcgcttccaccagatccacaggggtggaaaactccggagcaggtcctacatcttttaagaccatgaaagtcattgaccctcagcacagcgacaaaccaaacgtgctgatactgggttcggggtggggagctatttcgtttttaaagcacattgacaccaagaagtacaacgtttccatcatctctcctagaagctatttcatctttacgcctttgttaccttctgcaccagttgggacagtagacgaaaagtcaattattgagcccatcgttaattttgctctcaagaaaaaggggaacgttacctactatgaggcagaagccacctctatcaatcccgacaggaataccgttaccataaaatcattatctgccgttagccagctataccaacctgaaaaccatctagggctgcatcaagcagaacctgctgaaattaagtacgattatttaatcagtgctgtaggtgcggaacctaacacatttggtattcctggggtcactgattacggtcatttcctgaaggaaattcccaactctttggaaataagaagaacttttgccgccaatctagagaaggctaacttattgccaaagggtgatcccgaaagaagaagactactgtccattgtcgtggttggtggtgggcctactggtgtagaggccgctggtgaactacaggattatgttcaccaggacctgagaaagtttctccctgcattggccgaagaagtccaaattcacttggtcgaagctctgcccatcgttttgaatatgtttgagaaaaagctttcatcatacgcgcaatcacatttagaaaacacttcgatcaaagtacatctgagaacggctgtcgccaaagttgaagaaaagcaattgttggcaaagacgaaacacgaagacggtaaaataaccgaagaaactattccatacggtactttgatttgggccacgggtaacaaggcaagaccggtaatcacagaccttttcaagaaaattcctgagcaaaactcgtccaagagaggattggcagtgaatgactttttgcaagtgaaaggcagcaacaacattttcgccattggtgacaatgcatttgctgggttgccaccaaccgcccaagtggcgcaccaagaggccgaatatttggccaagaattttgataaaatggctcaaataccaaatttccaaaagaatctatcttcaagaaaggataaaattgatctcttgttcgaggagaacaactttaaacctttcaaatacaacgatttaggtgccttagcatacctgggatccgaaagggccattgcaaccatacgttccggtaagagaacattttacaccggtggtggcttaatgaccttctacttatggagaattatctacttgtccatgattctatctgcaagatcgagattaaaggtctttttcgactggattaaattagcatttttcaaaagagacttttttaaaggattatag

SEQ ID NO: 599 - DNA, 1542 bp, Artificial Sequence
  source: /note="Description of Artificial Sequence: Synthetic polynucleotide"
atgctatcgaagaatttgtatagtaacaagaggttgctcacctcgacgaatacgctagtcagattcgcttccaccagatccacaggggtggaaaactccggagcaggtcctacatcttttaagaccatgaaaatcattgaccctcagcacagcgacaaaccaaacgtgctgatactgggttcggggtggggagctatttcgtttttaaagcacattgacaccaagaagtacaacgtttccatcatctctcctagaagctatttcatctttacgcctttgttaccttctgcaccagttgggacagtagacgaaaagtcaattattgagcccatcgttaattttgctctcaagaaaaaggggaacgttacctactatgaggcagaagccacctctatcaatcccgacaggaataccgttaccataaaatcattatctgccgttagccagctataccaacctgaaaaccatctagggctgcatcaagcagaacctgctgaaattaagtacgattatttaatcagtgctgtaggtgcggaacctaacacatttggtattcctggggtcactgattacggtcatttcctgaaggaaattcccaactctttggaaataagaagaacttttgccgccaatctagagaaggctaacttattgccaaagggtgatcccgaaagaagaagactactgtccattgtcgtggttggtggtgggcctactggtgtagaggccgctggtgaactacaggattatgttcaccaggacctgagaaagtttctccctgcattggccgaagaagtccaaattcacttggtcgaagctctgcccatcgttttgaatatgtttgagaaaaagctttcatcatacgcgcaatcacatttagaaaacacttcgatcaaagtacatctgagaacggctgtcgccaaagttgaagaaaagcaattgttggcaaagacgaaacacgaagacggtaaaataaccgaagaaactattccatacggtactttgatttgggccacgggtaacaaggcaagaccggtaatcacagaccttttcaagaaaattcctgagcaaaactcgtccaagagaggattggcagtgaatgactttttgcaagtgaaaggcagcaacaacattttcgccattggtgacaatgcatttgctgggttgccaccaaccgcccaagtggcgcaccaagaggccgaatatttggccaagaattttgataaaatggctcaaataccaaatttccaaaagaatctatcttcaagaaaggataaaattgatctcttgttcgaggagaacaactttaaacctttcaaatacaacgatttaggtgccttagcatacctgggatccgaaagggccattgcaaccatacgttccggtaagagaacattttacaccggtggtggcttaatgaccttctacttatggagaattttgtacttgtccatgattctatctgcaagatcgagattaaaggtctttttcgactggattaaattagcatttttcaaaagagacttttttaaaggattatag

SEQ ID NO: 600 - DNA, 1542 bp, Artificial Sequence
  source: /note="Description of Artificial Sequence: Synthetic polynucleotide"
atgctatcgaagaatttgtatagtaacaagaggttgctcacctcgacgaatacgctagtcagattcgcttccaccagatccacaggggtggaaaactccggagcaggtcctacatcttttaagaccatgaaagtcattgaccctcagcacagcgacaaaccaaacgtgctgatactgggttcggggtggggagctatttcgtttttaaagcacattgacaccaagaagtacaacgtttccatcatctctcctagaagctatttcttatttacgcctttgttaccttctgcaccagttgggacagtagacgaaaagtcaattattgagcccatcgttaattttgctctcaagaaaaaggggaacgttacctactatgaggcagaagccacctctatcaatcccgacaggaataccgttaccataaaatcattatctgccgttagccagctataccaacctgaaaaccatctagggctgcatcaagcagaacctgctgaaattaagtacgattatttaatcagtgctgtaggtgcggaacctaacacatttggtattcctggggtcactgattacggtcatttcctgaaggaaattcccaactctttggaaataagaagaacttttgccgccaatctagagaaggctaacttattgccaaagggtgatcccgaaagaagaagactactgtccattgtcgtggttggtggtgggcctactggtgtagaggccgctggtgaactacaggattatgttcaccaggacctgagaaagtttctccctgcattggccgaagaaatccaaattcacttggtcgaagctctgcccatcgttttgaatatgtttgagaaaaagctttcatcatacgcgcaatcacatttagaaaacacttcgatcaaagtacatctgagaacggctgtcgccaaagttgaagaaaagcaattgttggcaaagacgaaacacgaagacggtaaaataaccgaagaaactattccatacggtactttgatttgggccacgggtaacaaggcaagaccggtaatcacagaccttttcaagaaaattcctgagcaaaactcgtccaagagaggattggcagtgaatgactttttgcaagtgaaaggcagcaacaacattttcgccattggtgacaatgcatttgctgggttgccaccaaccgcccaagtggcgcaccaagaggccgaatatttggccaagaattttgataaaatggctcaaataccaaatttccaaaagaatctatcttcaagaaaggataaaattgatctcttgttcgaggagaacaactttaaacctttcaaatacaacgatttaggtgccttagcatacctgggatccgaaagggccattgcaaccatacgttccggtaagagaacattttacaccggtggtggcttaatgaccttctacttatggagaattttgtacatgtccatgattctatctgcaagatcgagattaaaggtctttttcgactggattaaattagcatttttcaaaagagacttttttaaaggattatag

SEQ ID NO: 601 - DNA, 1542 bp, Artificial Sequence
  source: /note="Description of Artificial Sequence: Synthetic polynucleotide"
atgctatcgaagaatttgtatagtaacaagaggttgctcacctcgacgaatacgctagtcagattcgcttccaccagatccacaggggtggaaaactccggagcaggtcctacatcttttaagaccatgaaagtcattgaccctcagcacagcgacaaaccaaacgtgctgatactgggttcggggtggggagctatttcgtttttaaagcacattgacaccaagaagtacaacgtttccatcatctctcctagaagctatttcttatttacgcctttgttaccttctgcaccagttgggacagtagacgaaaagtcaattattgagcccatcgttaattttgctctcaagaaaaaggggaacgttacctactatgaggcagaagccacctctatcaatcccgacaggaataccgttaccataaaatcattatctgccgttagccagctataccaacctgaaaaccatctagggctgcatcaagcagaacctgctgaaattaagtacgattatttaatcagtgctgtaggtgcggaacctaacacatttggtattcctggggtcactgattacggtcatttcctgaaggaaattcccaactctttggaaataagaagaacttttgccgccaatctagagaaggctaacttattgccaaagggtgatcccgaaagaagaagactactgtccattgtcgtggttggtggtgggcctactggtgtagaggccgctggtgaactacaggattatgttcaccaggacctgagaaagtttctccctgcattggccgaagaaatccaaattcacttggtcgaagctctgcccatcgttttgaatatgtttgagaaaaagctttcatcatacgcgcaatcacatttagaaaacacttcgatcaaagtacatctgagaacggctgtcgccaaagttgaagaaaagcaattgttggcaaagacgaaacacgaagacggtaaaataaccgaagaaactattccatacggtactttgatttgggccacgggtaacaaggcaagaccggtaatcacagaccttttcaagaaaattcctgagcaaaactcgtccaagagaggattggcagtgaatgactttttgcaagtgaaaggcagcaacaacattttcgccattggtgacaatgcatttgctgggttgccaccaaccgcccaagtggcgcaccaagaggccgaatatttggccaagaattttgataaaatggctcaaataccaaatttccaaaagaatctatcttcaagaaaggataaaattgatctcttgttcgaggagaacaactttaaacctttcaaatacaacgatttaggtgccttagcatacctgggatccgaaagggccattgcaaccatacgttccggtaagagaacattttacaccggtggtggcttaatgaccttctacttatggagaattatctacttgtccatgattctatctgcaagatcgagattaaaggtctttttcgactggattaaattagcatttttcaaaagagacttttttaaaggattatag

SEQ ID NO: 602 - DNA, 1542 bp, Artificial Sequence
  source: /note="Description of Artificial Sequence: Synthetic polynucleotide"
atgctatcgaagaatttgtatagtaacaagaggttgctcacctcgacgaatacgctagtcagattcgcttccaccagatccacaggggtggaaaactccggagcaggtcctacatcttttaagaccatgaaaatcattgaccctcagcacagcgacaaaccaaacgtgctgatactgggttcggggtggggagctatttcgtttttaaagcacattgacaccaagaagtacaacgtttccatcatctctcctagaagctatttcttatttacgcctttgttaccttctgcaccagttgggacagtagacgaaaagtcaattattgagcccatcgttaattttgctctcaagaaaaaggggaacgttacctactatgaggcagaagccacctctatcaatcccgacaggaataccgttaccataaaatcattatctgccgttagccagctataccaacctgaaaaccatctagggctgcatcaagcagaacctgctgaaattaagtacgattatttaatcagtgctgtaggtgcggaacctaacacatttggtattcctggggtcactgattacggtcatttcctgaaggaaattcccaactctttggaaataagaagaacttttgccgccaatctagagaaggctaacttattgccaaagggtgatcccgaaagaagaagactactgtccattgtcgtggttggtggtgggcctactggtgtagaggccgctggtgaactacaggattatgttcaccaggacctgagaaagtttctccctgcattggccgaagaaatccaaattcacttggtcgaagctctgcccatcgttttgaatatgtttgagaaaaagctttcatcatacgcgcaatcacatttagaaaacacttcgatcaaagtacatctgagaacggctgtcgccaaagttgaagaaaagcaattgttggcaaagacgaaacacgaagacggtaaaataaccgaagaaactattccatacggtactttgatttgggccacgggtaacaaggcaagaccggtaatcacagaccttttcaagaaaattcctgagcaaaactcgtccaagagaggattggcagtgaatgactttttgcaagtgaaaggcagcaacaacattttcgccattggtgacaatgcatttgctgggttgccaccaaccgcccaagtggcgcaccaagaggccgaatatttggccaagaattttgataaaatggctcaaataccaaatttccaaaagaatctatcttcaagaaaggataaaattgatctcttgttcgaggagaacaactttaaacctttcaaatacaacgatttaggtgccttagcatacctgggatccgaaagggccattgcaaccatacgttccggtaagagaacattttacaccggtggtggcttaatgaccttctacttatggagaattttgtacttgtccatgattctatctgcaagatcgagattaaaggtctttttcgactggattaaattagcatttttcaaaagagacttttttaaaggattatag

SEQ ID NO: 603 - DNA, 1542 bp, Artificial Sequence
  source: /note="Description of Artificial Sequence: Synthetic polynucleotide"
atgctatcgaagaatttgtatagtaacaagaggttgctcacctcgacgaatacgctagtcagattcgcttccaccagatccacaggggtggaaaactccggagcaggtcctacatcttttaagaccatgaaagtcattgaccctcagcacagcgacaaaccaaacgtgctgatactgggttcggggtggggagctatttcgtttttaaagcacattgacaccaagaagtacaacgtttccatcatctctcctagaagctatttcttatttacgcctttgttaccttctgcaccagttgggacagtagacgaaaagtcaattattgagcccatcgttaattttgctctcaagaaaaaggggaacgttacctactatgaggcagaagccacctctatcaatcccgacaggaataccgttaccataaaatcattatctgccgttagccagctataccaacctgaaaaccatctagggctgcatcaagcagaacctgctgaaattaagtacgattatttaatcagtgctgtaggtgcggaacctaacacatttggtattcctggggtcactgattacggtcatttcctgaaggaaattcccaactctttggaaataagaagaacttttgccgccaatctagagaaggctaacttattgccaaagggtgatcccgaaagaagaagactactgtccattgtcgtggttggtggtgggcctactggtgtagaggccgctggtgaactacaggattatgttcaccaggacctgagaaagtttctccctgcattggccgaagaagtccaaattcacttggtcgaagctctgcccatcgttttgaatatgtttgagaaaaagctttcatcatacgcgcaatcacatttagaaaacacttcgatcaaagtacatctgagaacggctgtcgccaaagttgaagaaaagcaattgttggcaaagacgaaacacgaagacggtaaaataaccgaagaaactattccatacggtactttgatttgggccacgggtaacaaggcaagaccggtaatcacagaccttttcaagaaaattcctgagcaaaactcgtccaagagaggattggcagtgaatgactttttgcaagtgaaaggcagcaacaacattttcgccattggtgacaatgcatttgctgggttgccaccaaccgcccaagtggcgcaccaagaggccgaatatttggccaagaattttgataaaatggctcaaataccaaatttccaaaagaatctatcttcaagaaaggataaaattgatctcttgttcgaggagaacaactttaaacctttcaaatacaacgatttaggtgccttagcatacctgggatccgaaagggccattgcaaccatacgttccggtaagagaacattttacaccggtggtggcttaatgaccttctacttatggagaattatctacatgtccatgattctatctgcaagatcgagattaaaggtctttttcgactggattaaattagcatttttcaaaagagacttttttaaaggattatag

SEQ ID NO: 604 - DNA, 1542 bp, Artificial Sequence
  source: /note="Description of Artificial Sequence: Synthetic polynucleotide"
atgctatcgaagaatttgtatagtaacaagaggttgctcacctcgacgaatacgctagtcagattcgcttccaccagatccacaggggtggaaaactccggagcaggtcctacatcttttaagaccatgaaaatcattgaccctcagcacagcgacaaaccaaacgtgctgatactgggttcggggtggggagctatttcgtttttaaagcacattgacaccaagaagtacaacgtttccatcatctctcctagaagctatttcttatttacgcctttgttaccttctgcaccagttgggacagtagacgaaaagtcaattattgagcccatcgttaattttgctctcaagaaaaaggggaacgttacctactatgaggcagaagccacctctatcaatcccgacaggaataccgttaccataaaatcattatctgccgttagccagctataccaacctgaaaaccatctagggctgcatcaagcagaacctgctgaaattaagtacgattatttaatcagtgctgtaggtgcggaacctaacacatttggtattcctggggtcactgattacggtcatttcctgaaggaaattcccaactctttggaaataagaagaacttttgccgccaatctagagaaggctaacttattgccaaagggtgatcccgaaagaagaagactactgtccattgtcgtggttggtggtgggcctactggtgtagaggccgctggtgaactacaggattatgttcaccaggacctgagaaagtttctccctgcattggccgaagaagtccaaattcacttggtcgaagctctgcccatcgttttgaatatgtttgagaaaaagctttcatcatacgcgcaatcacatttagaaaacacttcgatcaaagtacatctgagaacggctgtcgccaaagttgaagaaaagcaattgttggcaaagacgaaacacgaagacggtaaaataaccgaagaaactattccatacggtactttgatttgggccacgggtaacaaggcaagaccggtaatcacagaccttttcaagaaaattcctgagcaaaactcgtccaagagaggattggcagtgaatgactttttgcaagtgaaaggcagcaacaacattttcgccattggtgacaatgcatttgctgggttgccaccaaccgcccaagtggcgcaccaagaggccgaatatttggccaagaattttgataaaatggctcaaataccaaatttccaaaagaatctatcttcaagaaaggataaaattgatctcttgttcgaggagaacaactttaaacctttcaaatacaacgatttaggtgccttagcatacctgggatccgaaagggccattgcaaccatacgttccggtaagagaacattttacaccggtggtggcttaatgaccttctacttatggagaattttgtacatgtccatgattctatctgcaagatcgagattaaaggtctttttcgactggattaaattagcatttttcaaaagagacttttttaaaggattatag

SEQ ID NO: 605 - DNA, 1542 bp, Artificial Sequence
  source: /note="Description of Artificial Sequence: Synthetic polynucleotide"
atgctatcgaagaatttgtatagtaacaagaggttgctcacctcgacgaatacgctagtcagattcgcttccaccagatccacaggggtggaaaactccggagcaggtcctacatcttttaagaccatgaaaatcattgaccctcagcacagcgacaaaccaaacgtgctgatactgggttcggggtggggagctatttcgtttttaaagcacattgacaccaagaagtacaacgtttccatcatctctcctagaagctatttcttatttacgcctttgttaccttctgcaccagttgggacagtagacgaaaagtcaattattgagcccatcgttaattttgctctcaagaaaaaggggaacgttacctactatgaggcagaagccacctctatcaatcccgacaggaataccgttaccataaaatcattatctgccgttagccagctataccaacctgaaaaccatctagggctgcatcaagcagaacctgctgaaattaagtacgattatttaatcagtgctgtaggtgcggaacctaacacatttggtattcctggggtcactgattacggtcatttcctgaaggaaattcccaactctttggaaataagaagaacttttgccgccaatctagagaaggctaacttattgccaaagggtgatcccgaaagaagaagactactgtccattgtcgtggttggtggtgggcctactggtgtagaggccgctggtgaactacaggattatgttcaccaggacctgagaaagtttctccctgcattggccgaagaagtccaaattcacttggtcgaagctctgcccatcgttttgaatatgtttgagaaaaagctttcatcatacgcgcaatcacatttagaaaacacttcgatcaaagtacatctgagaacggctgtcgccaaagttgaagaaaagcaattgttggcaaagacgaaacacgaagacggtaaaataaccgaagaaactattccatacggtactttgatttgggccacgggtaacaaggcaagaccggtaatcacagaccttttcaagaaaattcctgagcaaaactcgtccaagagaggattggcagtgaatgactttttgcaagtgaaaggcagcaacaacattttcgccattggtgacaatgcatttgctgggttgccaccaaccgcccaagtggcgcaccaagaggccgaatatttggccaagaattttgataaaatggctcaaataccaaatttccaaaagaatctatcttcaagaaaggataaaattgatctcttgttcgaggagaacaactttaaacctttcaaatacaacgatttaggtgccttagcatacctgggatccgaaagggccattgcaaccatacgttccggtaagagaacattttacaccggtggtggcttaatgaccttctacttatggagaattatctacttgtccatgattctatctgcaagatcgagattaaaggtctttttcgactggattaaattagcatttttcaaaagagacttttttaaaggattatag

SEQ ID NO: 606 - DNA, 1542 bp, Artificial Sequence
  source: /note="Description of Artificial Sequence: Synthetic polynucleotide"
atgctatcgaagaatttgtatagtaacaagaggttgctcacctcgacgaatacgctagtcagattcgcttccaccagatccacaggggtggaaaactccggagcaggtcctacatcttttaagaccatgaaagtcattgaccctcagcacagcgacaaaccaaacgtgctgatactgggttcggggtggggagctatttcgtttttaaagcacattgacaccaagaagtacaacgtttccatcgtgtctcctagaagctatttcatctacacgcctttgttaccttctgcaccagttgggacagtagacgaaaagtcaattattgagcccatcgttaattttgctctcaagaaaaaggggaacgttacctactatgaggcagaagccacctctatcaatcccgacaggaataccgttaccataaaatcattatctgccgttagccagctataccaacctgaaaaccatctagggctgcatcaagcagaacctgctgaaattaagtacgattatttaatcagtgctgtaggtgcggaacctaacacatttggtattcctggggtcactgattacggtcatttcctgaaggaaattcccaactctttggaaataagaagaacttttgccgccaatctagagaaggctaacttattgccaaagggtgatcccgaaagaagaagactactgtccattgtcgtggttggtggtgggcctactggtgtagaggccgctggtgaactacaggattatgttcaccaggacctgagaaagtttctccctgcattggccgaagaagtccaaattcacttggtcgaagctctgcccatcgttttgaatatgtttgagaaaaagctttcatcatacgcgcaatcacatttagaaaacacttcgatcaaagtacatctgagaacggctgtcgccaaagttgaagaaaagcaattgttggcaaagacgaaacacgaagacggtaaaataaccgaagaaactattccatacggtactttgatttgggccacgggtaacaaggcaagaccggtaatcacagaccttttcaagaaaattcctgagcaaaactcgtccaagagaggattggcagtgaatgactttttgcaagtgaaaggcagcaacaacattttcgccattggtgacaatgcatttgctgggttgccaccaaccgcccaagtggcgcaccaagaggccgaatatttggccaagaattttgataaaatggctcaaataccaaatttccaaaagaatctatcttcaagaaaggataaaattgatctcttgttcgaggagaacaactttaaacctttcaaatacaacgatttaggtgccttagcatacctgggatccgaaagggccattgcaaccatacgttccggtaagagaacattttacaccggtggtggcttaatgaccttctacttatggagaattttgtacttgtccatgattctatctgcaagatcgagattaaaggtctttttcgactggattaaattagcatttttcaaaagagacttttttaaaggattatag

SEQ ID NO: 607 - DNA, 1542 bp, Artificial Sequence
  source: /note="Description of Artificial Sequence: Synthetic polynucleotide"
atgctatcgaagaatttgtatagtaacaagaggttgctcacctcgacgaatacgctagtcagattcgcttccaccagatccacaggggtggaaaactccggagcaggtcctacatcttttaagaccatgaaagtcattgaccctcagcacagcgacaaaccaaacgtgctgatactgggttcggggtggggagctatttcgtttttaaagcacattgacaccaagaagtacaacgtttccatcgtgtctcctagaagctatttcttatacacgcctttgttaccttctgcaccagttgggacagtagacgaaaagtcaattattgagcccatcgttaattttgctctcaagaaaaaggggaacgttacctactatgaggcagaagccacctctatcaatcccgacaggaataccgttaccataaaatcattatctgccgttagccagctataccaacctgaaaaccatctagggctgcatcaagcagaacctgctgaaattaagtacgattatttaatcagtgctgtaggtgcggaacctaacacatttggtattcctggggtcactgattacggtcatttcctgaaggaaattcccaactctttggaaataagaagaacttttgccgccaatctagagaaggctaacttattgccaaagggtgatcccgaaagaagaagactactgtccattgtcgtggttggtggtgggcctactggtgtagaggccgctggtgaactacaggattatgttcaccaggacctgagaaagtttctccctgcattggccgaagaaatccaaattcacttggtcgaagctctgcccatcgttttgaatatgtttgagaaaaagctttcatcatacgcgcaatcacatttagaaaacacttcgatcaaagtacatctgagaacggctgtcgccaaagttgaagaaaagcaattgttggcaaagacgaaacacgaagacggtaaaataaccgaagaaactattccatacggtactttgatttgggccacgggtaacaaggcaagaccggtaatcacagaccttttcaagaaaattcctgagcaaaactcgtccaagagaggattggcagtgaatgactttttgcaagtgaaaggcagcaacaacattttcgccattggtgacaatgcatttgctgggttgccaccaaccgcccaagtggcgcaccaagaggccgaatatttggccaagaattttgataaaatggctcaaataccaaatttccaaaagaatctatcttcaagaaaggataaaattgatctcttgttcgaggagaacaactttaaacctttcaaatacaacgatttaggtgccttagcatacctgggatccgaaagggccattgcaaccatacgttccggtaagagaacattttacaccggtggtggcttaatgaccttctacttatggagaattttgtacttgtccatgattctatctgcaagatcgagattaaaggtctttttcgactggattaaattagcatttttcaaaagagacttttttaaaggattatag

SEQ ID NO: 608 - DNA, 1542 bp, Artificial Sequence
  source: /note="Description of Artificial Sequence: Synthetic polynucleotide"
atgctatcgaagaatttgtatagtaacaagaggttgctcacctcgacgaatacgctagtcagattcgcttccaccagatccacaggggtggaaaactccggagcaggtcctacatcttttaagaccatgaaagtcattgaccctcagcacagcgacaaaccaaacgtgctgatactgggttcggggtggggagctatttcgtttttaaagcacattgacaccaagaagtacaacgtttccatcgtgtctcctagaagctatttcttatacacgcctttgttaccttctgcaccagttgggacagtagacgaaaagtcaattattgagcccatcgttaattttgctctcaagaaaaaggggaacgttacctactatgaggcagaagccacctctatcaatcccgacaggaataccgttaccataaaatcattatctgccgttagccagctataccaacctgaaaaccatctagggctgcatcaagcagaacctgctgaaattaagtacgattatttaatcagtgctgtaggtgcggaacctaacacatttggtattcctggggtcactgattacggtcatttcctgaaggaaattcccaactctttggaaataagaagaacttttgccgccaatctagagaaggctaacttattgccaaagggtgatcccgaaagaagaagactactgtccattgtcgtggttggtggtgggcctactggtgtagaggccgctggtgaactacaggattatgttcaccaggacctgagaaagtttctccctgcattggccgaagaagtccaaattcacttggtcgaagctctgcccatcgttttgaatatgtttgagaaaaagctttcatcatacgcgcaatcacatttagaaaacacttcgatcaaagtacatctgagaacggctgtcgccaaagttgaagaaaagcaattgttggcaaagacgaaacacgaagacggtaaaataaccgaagaaactattccatacggtactttgatttgggccacgggtaacaaggcaagaccggtaatcacagaccttttcaagaaaattcctgagcaaaactcgtccaagagaggattggcagtgaatgactttttgcaagtgaaaggcagcaacaacattttcgccattggtgacaatgcatttgctgggttgccaccaaccgcccaagtggcgcaccaagaggccgaatatttggccaagaattttgataaaatggctcaaataccaaatttccaaaagaatctatcttcaagaaaggataaaattgatctcttgttcgaggagaacaactttaaacctttcaaatacaacgatttaggtgccttagcatacctgggatccgaaagggccattgcaaccatacgttccggtaagagaacattttacaccggtggtggcttaatgaccttctacttatggagaattttgtacatgtccatgattctatctgcaagatcgagattaaaggtctttttcgactggattaaattagcatttttcaaaagagacttttttaaaggattatag

SEQ ID NO: 609 - DNA, 1542 bp, Artificial Sequence
  source: /note="Description of Artificial Sequence: Synthetic polynucleotide"
atgctatcgaagaatttgtatagtaacaagaggttgctcacctcgacgaatacgctagtcagattcgcttccaccagatccacaggggtggaaaactccggagcaggtcctacatcttttaagaccatgaaagtcattgaccctcagcacagcgacaaaccaaacgtgctgatactgggttcggggtggggagctatttcgtttttaaagcacattgacaccaagaagtacaacgtttccatcgtgtctcctagaagctatttcttatacacgcctttgttaccttctgcaccagttgggacagtagacgaaaagtcaattattgagcccatcgttaattttgctctcaagaaaaaggggaacgttacctactatgaggcagaagccacctctatcaatcccgacaggaataccgttaccataaaatcattatctgccgttagccagctataccaacctgaaaaccatctagggctgcatcaagcagaacctgctgaaattaagtacgattatttaatcagtgctgtaggtgcggaacctaacacatttggtattcctggggtcactgattacggtcatttcctgaaggaaattcccaactctttggaaataagaagaacttttgccgccaatctagagaaggctaacttattgccaaagggtgatcccgaaagaagaagactactgtccattgtcgtggttggtggtgggcctactggtgtagaggccgctggtgaactacaggattatgttcaccaggacctgagaaagtttctccctgcattggccgaagaagtccaaattcacttggtcgaagctctgcccatcgttttgaatatgtttgagaaaaagctttcatcatacgcgcaatcacatttagaaaacacttcgatcaaagtacatctgagaacggctgtcgccaaagttgaagaaaagcaattgttggcaaagacgaaacacgaagacggtaaaataaccgaagaaactattccatacggtactttgatttgggccacgggtaacaaggcaagaccggtaatcacagaccttttcaagaaaattcctgagcaaaactcgtccaagagaggattggcagtgaatgactttttgcaagtgaaaggcagcaacaacattttcgccattggtgacaatgcatttgctgggttgccaccaaccgcccaagtggcgcaccaagaggccgaatatttggccaagaattttgataaaatggctcaaataccaaatttccaaaagaatctatcttcaagaaaggataaaattgatctcttgttcgaggagaacaactttaaacctttcaaatacaacgatttaggtgccttagcatacctgggatccgaaagggccattgcaaccatacgttccggtaagagaacattttacaccggtggtggcttaatgaccttctacttatggagaattatctacttgtccatgattctatctgcaagatcgagattaaaggtctttttcgactggattaaattagcatttttcaaaagagacttttttaaaggattatag

SEQ ID NO: 610 - DNA, 1542 bp, Artificial Sequence
  source: /note="Description of Artificial Sequence: Synthetic polynucleotide"
atgctatcgaagaatttgtatagtaacaagaggttgctcacctcgacgaatacgctagtcagattcgcttccaccagatccacaggggtggaaaactccggagcaggtcctacatcttttaagaccatgaaaatcattgaccctcagcacagcgacaaaccaaacgtgctgatactgggttcggggtggggagctatttcgtttttaaagcacattgacaccaagaagtacaacgtttccatcgtgtctcctagaagctatttcttatacacgcctttgttaccttctgcaccagttgggacagtagacgaaaagtcaattattgagcccatcgttaattttgctctcaagaaaaaggggaacgttacctactatgaggcagaagccacctctatcaatcccgacaggaataccgttaccataaaatcattatctgccgttagccagctataccaacctgaaaaccatctagggctgcatcaagcagaacctgctgaaattaagtacgattatttaatcagtgctgtaggtgcggaacctaacacatttggtattcctggggtcactgattacggtcatttcctgaaggaaattcccaactctttggaaataagaagaacttttgccgccaatctagagaaggctaacttattgccaaagggtgatcccgaaagaagaagactactgtccattgtcgtggttggtggtgggcctactggtgtagaggccgctggtgaactacaggattatgttcaccaggacctgagaaagtttctccctgcattggccgaagaagtccaaattcacttggtcgaagctctgcccatcgttttgaatatgtttgagaaaaagctttcatcatacgcgcaatcacatttagaaaacacttcgatcaaagtacatctgagaacggctgtcgccaaagttgaagaaaagcaattgttggcaaagacgaaacacgaagacggtaaaataaccgaagaaactattccatacggtactttgatttgggccacgggtaacaaggcaagaccggtaatcacagaccttttcaagaaaattcctgagcaaaactcgtccaagagaggattggcagtgaatgactttttgcaagtgaaaggcagcaacaacattttcgccattggtgacaatgcatttgctgggttgccaccaaccgcccaagtggcgcaccaagaggccgaatatttggccaagaattttgataaaatggctcaaataccaaatttccaaaagaatctatcttcaagaaaggataaaattgatctcttgttcgaggagaacaactttaaacctttcaaatacaacgatttaggtgccttagcatacctgggatccgaaagggccattgcaaccatacgttccggtaagagaacattttacaccggtggtggcttaatgaccttctacttatggagaattttgtacttgtccatgattctatctgcaagatcgagattaaaggtctttttcgactggattaaattagcatttttcaaaagagacttttttaaaggattatag

SEQ ID NO: 611 - DNA, 1542 bp, Artificial Sequence
  source: /note="Description of Artificial Sequence: Synthetic polynucleotide"
atgctatcgaagaatttgtatagtaacaagaggttgctcacctcgacgaatacgctagtcagattcgcttccaccagatccacaggggtggaaaactccggagcaggtcctacatcttttaagaccatgaaagtcattgaccctcagcacagcgacaaaccaaacgtgctgatactgggttcggggtggggagctatttcgtttttaaagcacattgacaccaagaagtacaacgtttccatcgtgtctcctagaagctatttcatctttacgcctttgttaccttctgcaccagttgggacagtagacgaaaagtcaattattgagcccatcgttaattttgctctcaagaaaaaggggaacgttacctactatgaggcagaagccacctctatcaatcccgacaggaataccgttaccataaaatcattatctgccgttagccagctataccaacctgaaaaccatctagggctgcatcaagcagaacctgctgaaattaagtacgattatttaatcagtgctgtaggtgcggaacctaacacatttggtattcctggggtcactgattacggtcatttcctgaaggaaattcccaactctttggaaataagaagaacttttgccgccaatctagagaaggctaacttattgccaaagggtgatcccgaaagaagaagactactgtccattgtcgtggttggtggtgggcctactggtgtagaggccgctggtgaactacaggattatgttcaccaggacctgagaaagtttctccctgcattggccgaagaaatccaaattcacttggtcgaagctctgcccatcgttttgaatatgtttgagaaaaagctttcatcatacgcgcaatcacatttagaaaacacttcgatcaaagtacatctgagaacggctgtcgccaaagttgaagaaaagcaattgttggcaaagacgaaacacgaagacggtaaaataaccgaagaaactattccatacggtactttgatttgggccacgggtaacaaggcaagaccggtaatcacagaccttttcaagaaaattcctgagcaaaactcgtccaagagaggattggcagtgaatgactttttgcaagtgaaaggcagcaacaacattttcgccattggtgacaatgcatttgctgggttgccaccaaccgcccaagtggcgcaccaagaggccgaatatttggccaagaattttgataaaatggctcaaataccaaatttccaaaagaatctatcttcaagaaaggataaaattgatctcttgttcgaggagaacaactttaaacctttcaaatacaacgatttaggtgccttagcatacctgggatccgaaagggccattgcaaccatacgttccggtaagagaacattttacaccggtggtggcttaatgaccttctacttatggagaattttgtacttgtccatgattctatctgcaagatcgagattaaaggtctttttcgactggattaaattagcatttttcaaaagagacttttttaaaggattatag

SEQ ID NO: 612 - DNA, 1542 bp, Artificial Sequence
  source: /note="Description of Artificial Sequence: Synthetic polynucleotide"
atgctatcgaagaatttgtatagtaacaagaggttgctcacctcgacgaatacgctagtcagattcgcttccaccagatccacaggggtggaaaactccggagcaggtcctacatcttttaagaccatgaaagtcattgaccctcagcacagcgacaaaccaaacgtgctgatactgggttcggggtggggagctatttcgtttttaaagcacattgacaccaagaagtacaacgtttccatcgtgtctcctagaagctatttcatctttacgcctttgttaccttctgcaccagttgggacagtagacgaaaagtcaattattgagcccatcgttaattttgctctcaagaaaaaggggaacgttacctactatgaggcagaagccacctctatcaatcccgacaggaataccgttaccataaaatcattatctgccgttagccagctataccaacctgaaaaccatctagggctgcatcaagcagaacctgctgaaattaagtacgattatttaatcagtgctgtaggtgcggaacctaacacatttggtattcctggggtcactgattacggtcatttcctgaaggaaattcccaactctttggaaataagaagaacttttgccgccaatctagagaaggctaacttattgccaaagggtgatcccgaaagaagaagactactgtccattgtcgtggttggtggtgggcctactggtgtagaggccgctggtgaactacaggattatgttcaccaggacctgagaaagtttctccctgcattggccgaagaagtccaaattcacttggtcgaagctctgcccatcgttttgaatatgtttgagaaaaagctttcatcatacgcgcaatcacatttagaaaacacttcgatcaaagtacatctgagaacggctgtcgccaaagttgaagaaaagcaattgttggcaaagacgaaacacgaagacggtaaaataaccgaagaaactattccatacggtactttgatttgggccacgggtaacaaggcaagaccggtaatcacagaccttttcaagaaaattcctgagcaaaactcgtccaagagaggattggcagtgaatgactttttgcaagtgaaaggcagcaacaacattttcgccattggtgacaatgcatttgctgggttgccaccaaccgcccaagtggcgcaccaagaggccgaatatttggccaagaattttgataaaatggctcaaataccaaatttccaaaagaatctatcttcaagaaaggataaaattgatctcttgttcgaggagaacaactttaaacctttcaaatacaacgatttaggtgccttagcatacctgggatccgaaagggccattgcaaccatacgttccggtaagagaacattttacaccggtggtggcttaatgaccttctacttatggagaattttgtacatgtccatgattctatctgcaagatcgagattaaaggtctttttcgactggattaaattagcatttttcaaaagagacttttttaaaggattatag

SEQ ID NO: 613 - DNA, 1542 bp, Artificial Sequence
  source: /note="Description of Artificial Sequence: Synthetic polynucleotide"
atgctatcgaagaatttgtatagtaacaagaggttgctcacctcgacgaatacgctagtcagattcgcttccaccagatccacaggggtggaaaactccggagcaggtcctacatcttttaagaccatgaaagtcattgaccctcagcacagcgacaaaccaaacgtgctgatactgggttcggggtggggagctatttcgtttttaaagcacattgacaccaagaagtacaacgtttccatcgtgtctcctagaagctatttcatctttacgcctttgttaccttctgcaccagttgggacagtagacgaaaagtcaattattgagcccatcgttaattttgctctcaagaaaaaggggaacgttacctactatgaggcagaagccacctctatcaatcccgacaggaataccgttaccataaaatcattatctgccgttagccagctataccaacctgaaaaccatctagggctgcatcaagcagaacctgctgaaattaagtacgattatttaatcagtgctgtaggtgcggaacctaacacatttggtattcctggggtcactgattacggtcatttcctgaaggaaattcccaactctttggaaataagaagaacttttgccgccaatctagagaaggctaacttattgccaaagggtgatcccgaaagaagaagactactgtccattgtcgtggttggtggtgggcctactggtgtagaggccgctggtgaactacaggattatgttcaccaggacctgagaaagtttctccctgcattggccgaagaagtccaaattcacttggtcgaagctctgcccatcgttttgaatatgtttgagaaaaagctttcatcatacgcgcaatcacatttagaaaacacttcgatcaaagtacatctgagaacggctgtcgccaaagttgaagaaaagcaattgttggcaaagacgaaacacgaagacggtaaaataaccgaagaaactattccatacggtactttgatttgggccacgggtaacaaggcaagaccggtaatcacagaccttttcaagaaaattcctgagcaaaactcgtccaagagaggattggcagtgaatgactttttgcaagtgaaaggcagcaacaacattttcgccattggtgacaatgcatttgctgggttgccaccaaccgcccaagtggcgcaccaagaggccgaatatttggccaagaattttgataaaatggctcaaataccaaatttccaaaagaatctatcttcaagaaaggataaaattgatctcttgttcgaggagaacaactttaaacctttcaaatacaacgatttaggtgccttagcatacctgggatccgaaagggccattgcaaccatacgttccggtaagagaacattttacaccggtggtggcttaatgaccttctacttatggagaattatctacttgtccatgattctatctgcaagatcgagattaaaggtctttttcgactggattaaattagcatttttcaaaagagacttttttaaaggattatag

SEQ ID NO: 614 - DNA, 1542 bp, Artificial Sequence
  source: /note="Description of Artificial Sequence: Synthetic polynucleotide"
atgctatcgaagaatttgtatagtaacaagaggttgctcacctcgacgaatacgctagtcagattcgcttccaccagatccacaggggtggaaaactccggagcaggtcctacatcttttaagaccatgaaaatcattgaccctcagcacagcgacaaaccaaacgtgctgatactgggttcggggtggggagctatttcgtttttaaagcacattgacaccaagaagtacaacgtttccatcgtgtctcctagaagctatttcatctttacgcctttgttaccttctgcaccagttgggacagtagacgaaaagtcaattattgagcccatcgttaattttgctctcaagaaaaaggggaacgttacctactatgaggcagaagccacctctatcaatcccgacaggaataccgttaccataaaatcattatctgccgttagccagctataccaacctgaaaaccatctagggctgcatcaagcagaacctgctgaaattaagtacgattatttaatcagtgctgtaggtgcggaacctaacacatttggtattcctggggtcactgattacggtcatttcctgaaggaaattcccaactctttggaaataagaagaacttttgccgccaatctagagaaggctaacttattgccaaagggtgatcccgaaagaagaagactactgtccattgtcgtggttggtggtgggcctactggtgtagaggccgctggtgaactacaggattatgttcaccaggacctgagaaagtttctccctgcattggccgaagaagtccaaattcacttggtcgaagctctgcccatcgttttgaatatgtttgagaaaaagctttcatcatacgcgcaatcacatttagaaaacacttcgatcaaagtacatctgagaacggctgtcgccaaagttgaagaaaagcaattgttggcaaagacgaaacacgaagacggtaaaataaccgaagaaactattccatacggtactttgatttgggccacgggtaacaaggcaagaccggtaatcacagaccttttcaagaaaattcctgagcaaaactcgtccaagagaggattggcagtgaatgactttttgcaagtgaaaggcagcaacaacattttcgccattggtgacaatgcatttgctgggttgccaccaaccgcccaagtggcgcaccaagaggccgaatatttggccaagaattttgataaaatggctcaaataccaaatttccaaaagaatctatcttcaagaaaggataaaattgatctcttgttcgaggagaacaactttaaacctttcaaatacaacgatttaggtgccttagcatacctgggatccgaaagggccattgcaaccatacgttccggtaagagaacattttacaccggtggtggcttaatgaccttctacttatggagaattttgtacttgtccatgattctatctgcaagatcgagattaaaggtctttttcgactggattaaattagcatttttcaaaagagacttttttaaaggattatag

SEQ ID NO: 615 - DNA, 1542 bp, Artificial Sequence
  source: /note="Description of Artificial Sequence: Synthetic polynucleotide"
atgctatcgaagaatttgtatagtaacaagaggttgctcacctcgacgaatacgctagtcagattcgcttccaccagatccacaggggtggaaaactccggagcaggtcctacatcttttaagaccatgaaagtcattgaccctcagcacagcgacaaaccaaacgtgctgatactgggttcggggtggggagctatttcgtttttaaagcacattgacaccaagaagtacaacgtttccatcgtgtctcctagaagctatttcttatttacgcctttgttaccttctgcaccagttgggacagtagacgaaaagtcaattattgagcccatcgttaattttgctctcaagaaaaaggggaacgttacctactatgaggcagaagccacctctatcaatcccgacaggaataccgttaccataaaatcattatctgccgttagccagctataccaacctgaaaaccatctagggctgcatcaagcagaacctgctgaaattaagtacgattatttaatcagtgctgtaggtgcggaacctaacacatttggtattcctggggtcactgattacggtcatttcctgaaggaaattcccaactctttggaaataagaagaacttttgccgccaatctagagaaggctaacttattgccaaagggtgatcccgaaagaagaagactactgtccattgtcgtggttggtggtgggcctactggtgtagaggccgctggtgaactacaggattatgttcaccaggacctgagaaagtttctccctgcattggccgaagaaatccaaattcacttggtcgaagctctgcccatcgttttgaatatgtttgagaaaaagctttcatcatacgcgcaatcacatttagaaaacacttcgatcaaagtacatctgagaacggctgtcgccaaagttgaagaaaagcaattgttggcaaagacgaaacacgaagacggtaaaataaccgaagaaactattccatacggtactttgatttgggccacgggtaacaaggcaagaccggtaatcacagaccttttcaagaaaattcctgagcaaaactcgtccaagagaggattggcagtgaatgactttttgcaagtgaaaggcagcaacaacattttcgccattggtgacaatgcatttgctgggttgccaccaaccgcccaagtggcgcaccaagaggccgaatatttggccaagaattttgataaaatggctcaaataccaaatttccaaaagaatctatcttcaagaaaggataaaattgatctcttgttcgaggagaacaactttaaacctttcaaatacaacgatttaggtgccttagcatacctgggatccgaaagggccattgcaaccatacgttccggtaagagaacattttacaccggtggtggcttaatgaccttctacttatggagaattttgtacatgtccatgattctatctgcaagatcgagattaaaggtctttttcgactggattaaattagcatttttcaaaagagacttttttaaaggattatag

SEQ ID NO: 616 - DNA, 1542 bp, Artificial Sequence
  source: /note="Description of Artificial Sequence: Synthetic polynucleotide"
atgctatcgaagaatttgtatagtaacaagaggttgctcacctcgacgaatacgctagtcagattcgcttccaccagatccacaggggtggaaaactccggagcaggtcctacatcttttaagaccatgaaagtcattgaccctcagcacagcgacaaaccaaacgtgctgatactgggttcggggtggggagctatttcgtttttaaagcacattgacaccaagaagtacaacgtttccatcgtgtctcctagaagctatttcttatttacgcctttgttaccttctgcaccagttgggacagtagacgaaaagtcaattattgagcccatcgttaattttgctctcaagaaaaaggggaacgttacctactatgaggcagaagccacctctatcaatcccgacaggaataccgttaccataaaatcattatctgccgttagccagctataccaacctgaaaaccatctagggctgcatcaagcagaacctgctgaaattaagtacgattatttaatcagtgctgtaggtgcggaacctaacacatttggtattcctggggtcactgattacggtcatttcctgaaggaaattcccaactctttggaaataagaagaacttttgccgccaatctagagaaggctaacttattgccaaagggtgatcccgaaagaagaagactactgtccattgtcgtggttggtggtgggcctactggtgtagaggccgctggtgaactacaggattatgttcaccaggacctgagaaagtttctccctgcattggccgaagaaatccaaattcacttggtcgaagctctgcccatcgttttgaatatgtttgagaaaaagctttcatcatacgcgcaatcacatttagaaaacacttcgatcaaagtacatctgagaacggctgtcgccaaagttgaagaaaagcaattgttggcaaagacgaaacacgaagacggtaaaataaccgaagaaactattccatacggtactttgatttgggccacgggtaacaaggcaagaccggtaatcacagaccttttcaagaaaattcctgagcaaaactcgtccaagagaggattggcagtgaatgactttttgcaagtgaaaggcagcaacaacattttcgccattggtgacaatgcatttgctgggttgccaccaaccgcccaagtggcgcaccaagaggccgaatatttggccaagaattttgataaaatggctcaaataccaaatttccaaaagaatctatcttcaagaaaggataaaattgatctcttgttcgaggagaacaactttaaacctttcaaatacaacgatttaggtgccttagcatacctgggatccgaaagggccattgcaaccatacgttccggtaagagaacattttacaccggtggtggcttaatgaccttctacttatggagaattatctacttgtccatgattctatctgcaagatcgagattaaaggtctttttcgactggattaaattagcatttttcaaaagagacttttttaaaggattatag

SEQ ID NO: 617 - DNA, 1542 bp, Artificial Sequence
  source: /note="Description of Artificial Sequence: Synthetic polynucleotide"
atgctatcgaagaatttgtatagtaacaagaggttgctcacctcgacgaatacgctagtcagattcgcttccaccagatccacaggggtggaaaactccggagcaggtcctacatcttttaagaccatgaaaatcattgaccctcagcacagcgacaaaccaaacgtgctgatactgggttcggggtggggagctatttcgtttttaaagcacattgacaccaagaagtacaacgtttccatcgtgtctcctagaagctatttcttatttacgcctttgttaccttctgcaccagttgggacagtagacgaaaagtcaattattgagcccatcgttaattttgctctcaagaaaaaggggaacgttacctactatgaggcagaagccacctctatcaatcccgacaggaataccgttaccataaaatcattatctgccgttagccagctataccaacctgaaaaccatctagggctgcatcaagcagaacctgctgaaattaagtacgattatttaatcagtgctgtaggtgcggaacctaacacatttggtattcctggggtcactgattacggtcatttcctgaaggaaattcccaactctttggaaataagaagaacttttgccgccaatctagagaaggctaacttattgccaaagggtgatcccgaaagaagaagactactgtccattgtcgtggttggtggtgggcctactggtgtagaggccgctggtgaactacaggattatgttcaccaggacctgagaaagtttctccctgcattggccgaagaaatccaaattcacttggtcgaagctctgcccatcgttttgaatatgtttgagaaaaagctttcatcatacgcgcaatcacatttagaaaacacttcgatcaaagtacatctgagaacggctgtcgccaaagttgaagaaaagcaattgttggcaaagacgaaacacgaagacggtaaaataaccgaagaaactattccatacggtactttgatttgggccacgggtaacaaggcaagaccggtaatcacagaccttttcaagaaaattcctgagcaaaactcgtccaagagaggattggcagtgaatgactttttgcaagtgaaaggcagcaacaacattttcgccattggtgacaatgcatttgctgggttgccaccaaccgcccaagtggcgcaccaagaggccgaatatttggccaagaattttgataaaatggctcaaataccaaatttccaaaagaatctatcttcaagaaaggataaaattgatctcttgttcgaggagaacaactttaaacctttcaaatacaacgatttaggtgccttagcatacctgggatccgaaagggccattgcaaccatacgttccggtaagagaacattttacaccggtggtggcttaatgaccttctacttatggagaattttgtacttgtccatgattctatctgcaagatcgagattaaaggtctttttcgactggattaaattagcatttttcaaaagagacttttttaaaggattatag

SEQ ID NO: 618 - DNA, 1542 bp, Artificial Sequence
  source: /note="Description of Artificial Sequence: Synthetic polynucleotide"
atgctatcgaagaatttgtatagtaacaagaggttgctcacctcgacgaatacgctagtcagattcgcttccaccagatccacaggggtggaaaactccggagcaggtcctacatcttttaagaccatgaaagtcattgaccctcagcacagcgacaaaccaaacgtgctgatactgggttcggggtggggagctatttcgtttttaaagcacattgacaccaagaagtacaacgtttccatcgtgtctcctagaagctatttcttatttacgcctttgttaccttctgcaccagttgggacagtagacgaaaagtcaattattgagcccatcgttaattttgctctcaagaaaaaggggaacgttacctactatgaggcagaagccacctctatcaatcccgacaggaataccgttaccataaaatcattatctgccgttagccagctataccaacctgaaaaccatctagggctgcatcaagcagaacctgctgaaattaagtacgattatttaatcagtgctgtaggtgcggaacctaacacatttggtattcctggggtcactgattacggtcatttcctgaaggaaattcccaactctttggaaataagaagaacttttgccgccaatctagagaaggctaacttattgccaaagggtgatcccgaaagaagaagactactgtccattgtcgtggttggtggtgggcctactggtgtagaggccgctggtgaactacaggattatgttcaccaggacctgagaaagtttctccctgcattggccgaagaagtccaaattcacttggtcgaagctctgcccatcgttttgaatatgtttgagaaaaagctttcatcatacgcgcaatcacatttagaaaacacttcgatcaaagtacatctgagaacggctgtcgccaaagttgaagaaaagcaattgttggcaaagacgaaacacgaagacggtaaaataaccgaagaaactattccatacggtactttgatttgggccacgggtaacaaggcaagaccggtaatcacagaccttttcaagaaaattcctgagcaaaactcgtccaagagaggattggcagtgaatgactttttgcaagtgaaaggcagcaacaacattttcgccattggtgacaatgcatttgctgggttgccaccaaccgcccaagtggcgcaccaagaggccgaatatttggccaagaattttgataaaatggctcaaataccaaatttccaaaagaatctatcttcaagaaaggataaaattgatctcttgttcgaggagaacaactttaaacctttcaaatacaacgatttaggtgccttagcatacctgggatccgaaagggccattgcaaccatacgttccggtaagagaacattttacaccggtggtggcttaatgaccttctacttatggagaattatctacatgtccatgattctatctgcaagatcgagattaaaggtctttttcgactggattaaattagcatttttcaaaagagacttttttaaaggattatag

SEQ ID NO: 619 - DNA, 1542 bp, Artificial Sequence
  source: /note="Description of Artificial Sequence: Synthetic polynucleotide"
atgctatcgaagaatttgtatagtaacaagaggttgctcacctcgacgaatacgctagtcagattcgcttccaccagatccacaggggtggaaaactccggagcaggtcctacatcttttaagaccatgaaaatcattgaccctcagcacagcgacaaaccaaacgtgctgatactgggttcggggtggggagctatttcgtttttaaagcacattgacaccaagaagtacaacgtttccatcgtgtctcctagaagctatttcttatttacgcctttgttaccttctgcaccagttgggacagtagacgaaaagtcaattattgagcccatcgttaattttgctctcaagaaaaaggggaacgttacctactatgaggcagaagccacctctatcaatcccgacaggaataccgttaccataaaatcattatctgccgttagccagctataccaacctgaaaaccatctagggctgcatcaagcagaacctgctgaaattaagtacgattatttaatcagtgctgtaggtgcggaacctaacacatttggtattcctggggtcactgattacggtcatttcctgaaggaaattcccaactctttggaaataagaagaacttttgccgccaatctagagaaggctaacttattgccaaagggtgatcccgaaagaagaagactactgtccattgtcgtggttggtggtgggcctactggtgtagaggccgctggtgaactacaggattatgttcaccaggacctgagaaagtttctccctgcattggccgaagaagtccaaattcacttggtcgaagctctgcccatcgttttgaatatgtttgagaaaaagctttcatcatacgcgcaatcacatttagaaaacacttcgatcaaagtacatctgagaacggctgtcgccaaagttgaagaaaagcaattgttggcaaagacgaaacacgaagacggtaaaataaccgaagaaactattccatacggtactttgatttgggccacgggtaacaaggcaagaccggtaatcacagaccttttcaagaaaattcctgagcaaaactcgtccaagagaggattggcagtgaatgactttttgcaagtgaaaggcagcaacaacattttcgccattggtgacaatgcatttgctgggttgccaccaaccgcccaagtggcgcaccaagaggccgaatatttggccaagaattttgataaaatggctcaaataccaaatttccaaaagaatctatcttcaagaaaggataaaattgatctcttgttcgaggagaacaactttaaacctttcaaatacaacgatttaggtgccttagcatacctgggatccgaaagggccattgcaaccatacgttccggtaagagaacattttacaccggtggtggcttaatgaccttctacttatggagaattttgtacatgtccatgattctatctgcaagatcgagattaaaggtctttttcgactggattaaattagcatttttcaaaagagacttttttaaaggattatag

SEQ ID NO: 620 - DNA, 1542 bp, Artificial Sequence
  source: /note="Description of Artificial Sequence: Synthetic polynucleotide"
atgctatcgaagaatttgtatagtaacaagaggttgctcacctcgacgaatacgctagtcagattcgcttccaccagatccacaggggtggaaaactccggagcaggtcctacatcttttaagaccatgaaaatcattgaccctcagcacagcgacaaaccaaacgtgctgatactgggttcggggtggggagctatttcgtttttaaagcacattgacaccaagaagtacaacgtttccatcgtgtctcctagaagctatttcttatttacgcctttgttaccttctgcaccagttgggacagtagacgaaaagtcaattattgagcccatcgttaattttgctctcaagaaaaaggggaacgttacctactatgaggcagaagccacctctatcaatcccgacaggaataccgttaccataaaatcattatctgccgttagccagctataccaacctgaaaaccatctagggctgcatcaagcagaacctgctgaaattaagtacgattatttaatcagtgctgtaggtgcggaacctaacacatttggtattcctggggtcactgattacggtcatttcctgaaggaaattcccaactctttggaaataagaagaacttttgccgccaatctagagaaggctaacttattgccaaagggtgatcccgaaagaagaagactactgtccattgtcgtggttggtggtgggcctactggtgtagaggccgctggtgaactacaggattatgttcaccaggacctgagaaagtttctccctgcattggccgaagaagtccaaattcacttggtcgaagctctgcccatcgttttgaatatgtttgagaaaaagctttcatcatacgcgcaatcacatttagaaaacacttcgatcaaagtacatctgagaacggctgtcgccaaagttgaagaaaagcaattgttggcaaagacgaaacacgaagacggtaaaataaccgaagaaactattccatacggtactttgatttgggccacgggtaacaaggcaagaccggtaatcacagaccttttcaagaaaattcctgagcaaaactcgtccaagagaggattggcagtgaatgactttttgcaagtgaaaggcagcaacaacattttcgccattggtgacaatgcatttgctgggttgccaccaaccgcccaagtggcgcaccaagaggccgaatatttggccaagaattttgataaaatggctcaaataccaaatttccaaaagaatctatcttcaagaaaggataaaattgatctcttgttcgaggagaacaactttaaacctttcaaatacaacgatttaggtgccttagcatacctgggatccgaaagggccattgcaaccatacgttccggtaagagaacattttacaccggtggtggcttaatgaccttctacttatggagaattatctacttgtccatgattctatctgcaagatcgagattaaaggtctttttcgactggattaaattagcatttttcaaaagagacttttttaaaggattatag

SEQ ID NO: 621 - DNA, 1542 bp, Artificial Sequence
  source: /note="Description of Artificial Sequence: Synthetic polynucleotide"
atgctatcgaagaatttgtatagtaacaagaggttgctcacctcgacgaatacgctagtcagattcgcttccaccagatccacaggggtggaaaactccggagcaggtcctacatcttttaagaccatgaaagtcattgaccctcagcacagcgacaaaccaaacgtgctgatactgggttcggggtggggagctatttcgtttttaaagcacattgacaccaagaagtacaacgtttccatcatctctcctagaagctatttcatctacacgcctttgttaccttctgcaccagttgggacagtagacgaaaagtcaattattgagcccatcgttaattttgctctcaagaaaaaggggaacgttacctactatgaggcagaagccacctctatcaatcccgacaggaataccgttaccataaaatcattatctgccgttagccagctataccaacctgaaaaccatctagggctgcatcaagcagaacctgctgaaattaagtacgattatttaatcagtgctgtaggtgcggaacctaacacatttggtattcctggggtcactgattacggtcatttcctgaaggaaattcccaactctttggaaataagaagaacttttgccgccaatctagagaaggctaacttattgccaaagggtgatcccgaaagaagaagactactgtccattgtcgtggttggtggtgggcctactggtgtagaggccgctggtgaactacaggattatgttcaccaggacctgagaaagtttctccctgcattggccgaagaaatccaaattcacttggtcgaagctctgcccatcgttttgaatatgtttgagaaaaagctttcatcatacgcgcaatcacatttagaaaacacttcgatcaaagtacatctgagaacggctgtcgccaaagttgaagaaaagcaattgttggcaaagacgaaacacgaagacggtaaaataaccgaagaaactattccatacggtactttgatttgggccacgggtaacaaggcaagaccggtaatcacagaccttttcaagaaaattcctgagcaaaactcgtccaagagaggattggcagtgaatgactttttgcaagtgaaaggcagcaacaacattttcgccattggtgacaatgcatttgctgggttgccaccaaccgcccaagtggcgcaccaagaggccgaatatttggccaagaattttgataaaatggctcaaataccaaatttccaaaagaatctatcttcaagaaaggataaaattgatctcttgttcgaggagaacaactttaaacctttcaaatacaacgatttaggtgccttagcatacctgggatccgaaagggccattgcaaccatacgttccggtaagagaacattttacaccggtggtggcttaatgaccttctacttatggagaattttgtacttgtccatgattctatctgcaagatcgagattaaaggtctttttcgactggattaaattagcatttttcaaaagagacttttttaaaggattatag

SEQ ID NO: 622 - DNA, 1542 bp, Artificial Sequence
  source: /note="Description of Artificial Sequence: Synthetic polynucleotide"
atgctatcgaagaatttgtatagtaacaagaggttgctcacctcgacgaatacgctagtcagattcgcttccaccagatccacaggggtggaaaactccggagcaggtcctacatcttttaagaccatgaaagtcattgaccctcagcacagcgacaaaccaaacgtgctgatactgggttcggggtggggagctatttcgtttttaaagcacattgacaccaagaagtacaacgtttccatcatctctcctagaagctatttcatctacacgcctttgttaccttctgcaccagttgggacagtagacgaaaagtcaattattgagcccatcgttaattttgctctcaagaaaaaggggaacgttacctactatgaggcagaagccacctctatcaatcccgacaggaataccgttaccataaaatcattatctgccgttagccagctataccaacctgaaaaccatctagggctgcatcaagcagaacctgctgaaattaagtacgattatttaatcagtgctgtaggtgcggaacctaacacatttggtattcctggggtcactgattacggtcatttcctgaaggaaattcccaactctttggaaataagaagaacttttgccgccaatctagagaaggctaacttattgccaaagggtgatcccgaaagaagaagactactgtccattgtcgtggttggtggtgggcctactggtgtagaggccgctggtgaactacaggattatgttcaccaggacctgagaaagtttctccctgcattggccgaagaagtccaaattcacttggtcgaagctctgcccatcgttttgaatatgtttgagaaaaagctttcatcatacgcgcaatcacatttagaaaacacttcgatcaaagtacatctgagaacggctgtcgccaaagttgaagaaaagcaattgttggcaaagacgaaacacgaagacggtaaaataaccgaagaaactattccatacggtactttgatttgggccacgggtaacaaggcaagaccggtaatcacagaccttttcaagaaaattcctgagcaaaactcgtccaagagaggattggcagtgaatgactttttgcaagtgaaaggcagcaacaacattttcgccattggtgacaatgcatttgctgggttgccaccaaccgcccaagtggcgcaccaagaggccgaatatttggccaagaattttgataaaatggctcaaataccaaatttccaaaagaatctatcttcaagaaaggataaaattgatctcttgttcgaggagaacaactttaaacctttcaaatacaacgatttaggtgccttagcatacctgggatccgaaagggccattgcaaccatacgttccggtaagagaacattttacaccggtggtggcttaatgaccttctacttatggagaattttgtacatgtccatgattctatctgcaagatcgagattaaaggtctttttcgactggattaaattagcatttttcaaaagagacttttttaaaggattatag

SEQ ID NO: 623 - DNA, 1542 bp, Artificial Sequence
  source: /note="Description of Artificial Sequence: Synthetic polynucleotide"
atgctatcgaagaatttgtatagtaacaagaggttgctcacctcgacgaatacgctagtcagattcgcttccaccagatccacaggggtggaaaactccggagcaggtcctacatcttttaagaccatgaaagtcattgaccctcagcacagcgacaaaccaaacgtgctgatactgggttcggggtggggagctatttcgtttttaaagcacattgacaccaagaagtacaacgtttccatcatctctcctagaagctatttcatctacacgcctttgttaccttctgcaccagttgggacagtagacgaaaagtcaattattgagcccatcgttaattttgctctcaagaaaaaggggaacgttacctactatgaggcagaagccacctctatcaatcccgacaggaataccgttaccataaaatcattatctgccgttagccagctataccaacctgaaaaccatctagggctgcatcaagcagaacctgctgaaattaagtacgattatttaatcagtgctgtaggtgcggaacctaacacatttggtattcctggggtcactgattacggtcatttcctgaaggaaattcccaactctttggaaataagaagaacttttgccgccaatctagagaaggctaacttattgccaaagggtgatcccgaaagaagaagactactgtccattgtcgtggttggtggtgggcctactggtgtagaggccgctggtgaactacaggattatgttcaccaggacctgagaaagtttctccctgcattggccgaagaagtccaaattcacttggtcgaagctctgcccatcgttttgaatatgtttgagaaaaagctttcatcatacgcgcaatcacatttagaaaacacttcgatcaaagtacatctgagaacggctgtcgccaaagttgaagaaaagcaattgttggcaaagacgaaacacgaagacggtaaaataaccgaagaaactattccatacggtactttgatttgggccacgggtaacaaggcaagaccggtaatcacagaccttttcaagaaaattcctgagcaaaactcgtccaagagaggattggcagtgaatgactttttgcaagtgaaaggcagcaacaacattttcgccattggtgacaatgcatttgctgggttgccaccaaccgcccaagtggcgcaccaagaggccgaatatttggccaagaattttgataaaatggctcaaataccaaatttccaaaagaatctatcttcaagaaaggataaaattgatctcttgttcgaggagaacaactttaaacctttcaaatacaacgatttaggtgccttagcatacctgggatccgaaagggccattgcaaccatacgttccggtaagagaacattttacaccggtggtggcttaatgaccttctacttatggagaattatctacttgtccatgattctatctgcaagatcgagattaaaggtctttttcgactggattaaattagcatttttcaaaagagacttttttaaaggattatag

SEQ ID NO: 624 - DNA, 1542 bp, Artificial Sequence
  source: /note="Description of Artificial Sequence: Synthetic polynucleotide"
atgctatcgaagaatttgtatagtaacaagaggttgctcacctcgacgaatacgctagtcagattcgcttccaccagatccacaggggtggaaaactccggagcaggtcctacatcttttaagaccatgaaaatcattgaccctcagcacagcgacaaaccaaacgtgctgatactgggttcggggtggggagctatttcgtttttaaagcacattgacaccaagaagtacaacgtttccatcatctctcctagaagctatttcatctacacgcctttgttaccttctgcaccagttgggacagtagacgaaaagtcaattattgagcccatcgttaattttgctctcaagaaaaaggggaacgttacctactatgaggcagaagccacctctatcaatcccgacaggaataccgttaccataaaatcattatctgccgttagccagctataccaacctgaaaaccatctagggctgcatcaagcagaacctgctgaaattaagtacgattatttaatcagtgctgtaggtgcggaacctaacacatttggtattcctggggtcactgattacggtcatttcctgaaggaaattcccaactctttggaaataagaagaacttttgccgccaatctagagaaggctaacttattgccaaagggtgatcccgaaagaagaagactactgtccattgtcgtggttggtggtgggcctactggtgtagaggccgctggtgaactacaggattatgttcaccaggacctgagaaagtttctccctgcattggccgaagaagtccaaattcacttggtcgaagctctgcccatcgttttgaatatgtttgagaaaaagctttcatcatacgcgcaatcacatttagaaaacacttcgatcaaagtacatctgagaacggctgtcgccaaagttgaagaaaagcaattgttggcaaagacgaaacacgaagacggtaaaataaccgaagaaactattccatacggtactttgatttgggccacgggtaacaaggcaagaccggtaatcacagaccttttcaagaaaattcctgagcaaaactcgtccaagagaggattggcagtgaatgactttttgcaagtgaaaggcagcaacaacattttcgccattggtgacaatgcatttgctgggttgccaccaaccgcccaagtggcgcaccaagaggccgaatatttggccaagaattttgataaaatggctcaaataccaaatttccaaaagaatctatcttcaagaaaggataaaattgatctcttgttcgaggagaacaactttaaacctttcaaatacaacgatttaggtgccttagcatacctgggatccgaaagggccattgcaaccatacgttccggtaagagaacattttacaccggtggtggcttaatgaccttctacttatggagaattttgtacttgtccatgattctatctgcaagatcgagattaaaggtctttttcgactggattaaattagcatttttcaaaagagacttttttaaaggattatag

SEQ ID NO: 625 - DNA, 1542 bp, Artificial Sequence
  source: /note="Description of Artificial Sequence: Synthetic polynucleotide"
atgctatcgaagaatttgtatagtaacaagaggttgctcacctcgacgaatacgctagtcagattcgcttccaccagatccacaggggtggaaaactccggagcaggtcctacatcttttaagaccatgaaagtcattgaccctcagcacagcgacaaaccaaacgtgctgatactgggttcggggtggggagctatttcgtttttaaagcacattgacaccaagaagtacaacgtttccatcatctctcctagaagctatttcttatacacgcctttgttaccttctgcaccagttgggacagtagacgaaaagtcaattattgagcccatcgttaattttgctctcaagaaaaaggggaacgttacctactatgaggcagaagccacctctatcaatcccgacaggaataccgttaccataaaatcattatctgccgttagccagctataccaacctgaaaaccatctagggctgcatcaagcagaacctgctgaaattaagtacgattatttaatcagtgctgtaggtgcggaacctaacacatttggtattcctggggtcactgattacggtcatttcctgaaggaaattcccaactctttggaaataagaagaacttttgccgccaatctagagaaggctaacttattgccaaagggtgatcccgaaagaagaagactactgtccattgtcgtggttggtggtgggcctactggtgtagaggccgctggtgaactacaggattatgttcaccaggacctgagaaagtttctccctgcattggccgaagaaatccaaattcacttggtcgaagctctgcccatcgttttgaatatgtttgagaaaaagctttcatcatacgcgcaatcacatttagaaaacacttcgatcaaagtacatctgagaacggctgtcgccaaagttgaagaaaagcaattgttggcaaagacgaaacacgaagacggtaaaataaccgaagaaactattccatacggtactttgatttgggccacgggtaacaaggcaagaccggtaatcacagaccttttcaagaaaattcctgagcaaaactcgtccaagagaggattggcagtgaatgactttttgcaagtgaaaggcagcaacaacattttcgccattggtgacaatgcatttgctgggttgccaccaaccgcccaagtggcgcaccaagaggccgaatatttggccaagaattttgataaaatggctcaaataccaaatttccaaaagaatctatcttcaagaaaggataaaattgatctcttgttcgaggagaacaactttaaacctttcaaatacaacgatttaggtgccttagcatacctgggatccgaaagggccattgcaaccatacgttccggtaagagaacattttacaccggtggtggcttaatgaccttctacttatggagaattttgtacatgtccatgattctatctgcaagatcgagattaaaggtctttttcgactggattaaattagcatttttcaaaagagacttttttaaaggattatag

SEQ ID NO: 626 - DNA, 1542 bp, Artificial Sequence
  source: /note="Description of Artificial Sequence: Synthetic polynucleotide"
atgctatcgaagaatttgtatagtaacaagaggttgctcacctcgacgaatacgctagtcagattcgcttccaccagatccacaggggtggaaaactccggagcaggtcctacatcttttaagaccatgaaagtcattgaccctcagcacagcgacaaaccaaacgtgctgatactgggttcggggtggggagctatttcgtttttaaagcacattgacaccaagaagtacaacgtttccatcatctctcctagaagctatttcttatacacgcctttgttaccttctgcaccagttgggacagtagacgaaaagtcaattattgagcccatcgttaattttgctctcaagaaaaaggggaacgttacctactatgaggcagaagccacctctatcaatcccgacaggaataccgttaccataaaatcattatctgccgttagccagctataccaacctgaaaaccatctagggctgcatcaagcagaacctgctgaaattaagtacgattatttaatcagtgctgtaggtgcggaacctaacacatttggtattcctggggtcactgattacggtcatttcctgaaggaaattcccaactctttggaaataagaagaacttttgccgccaatctagagaaggctaacttattgccaaagggtgatcccgaaagaagaagactactgtccattgtcgtggttggtggtgggcctactggtgtagaggccgctggtgaactacaggattatgttcaccaggacctgagaaagtttctccctgcattggccgaagaaatccaaattcacttggtcgaagctctgcccatcgttttgaatatgtttgagaaaaagctttcatcatacgcgcaatcacatttagaaaacacttcgatcaaagtacatctgagaacggctgtcgccaaagttgaagaaaagcaattgttggcaaagacgaaacacgaagacggtaaaataaccgaagaaactattccatacggtactttgatttgggccacgggtaacaaggcaagaccggtaatcacagaccttttcaagaaaattcctgagcaaaactcgtccaagagaggattggcagtgaatgactttttgcaagtgaaaggcagcaacaacattttcgccattggtgacaatgcatttgctgggttgccaccaaccgcccaagtggcgcaccaagaggccgaatatttggccaagaattttgataaaatggctcaaataccaaatttccaaaagaatctatcttcaagaaaggataaaattgatctcttgttcgaggagaacaactttaaacctttcaaatacaacgatttaggtgccttagcatacctgggatccgaaagggccattgcaaccatacgttccggtaagagaacattttacaccggtggtggcttaatgaccttctacttatggagaattatctacttgtccatgattctatctgcaagatcgagattaaaggtctttttcgactggattaaattagcatttttcaaaagagacttttttaaaggattatag

SEQ ID NO: 627 - DNA, 1542 bp, Artificial Sequence
  source: /note="Description of Artificial Sequence: Synthetic polynucleotide"
atgctatcgaagaatttgtatagtaacaagaggttgctcacctcgacgaatacgctagtcagattcgcttccaccagatccacaggggtggaaaactccggagcaggtcctacatcttttaagaccatgaaaatcattgaccctcagcacagcgacaaaccaaacgtgctgatactgggttcggggtggggagctatttcgtttttaaagcacattgacaccaagaagtacaacgtttccatcatctctcctagaagctatttcttatacacgcctttgttaccttctgcaccagttgggacagtagacgaaaagtcaattattgagcccatcgttaattttgctctcaagaaaaaggggaacgttacctactatgaggcagaagccacctctatcaatcccgacaggaataccgttaccataaaatcattatctgccgttagccagctataccaacctgaaaaccatctagggctgcatcaagcagaacctgctgaaattaagtacgattatttaatcagtgctgtaggtgcggaacctaacacatttggtattcctggggtcactgattacggtcatttcctgaaggaaattcccaactctttggaaataagaagaacttttgccgccaatctagagaaggctaacttattgccaaagggtgatcccgaaagaagaagactactgtccattgtcgtggttggtggtgggcctactggtgtagaggccgctggtgaactacaggattatgttcaccaggacctgagaaagtttctccctgcattggccgaagaaatccaaattcacttggtcgaagctctgcccatcgttttgaatatgtttgagaaaaagctttcatcatacgcgcaatcacatttagaaaacacttcgatcaaagtacatctgagaacggctgtcgccaaagttgaagaaaagcaattgttggcaaagacgaaacacgaagacggtaaaataaccgaagaaactattccatacggtactttgatttgggccacgggtaacaaggcaagaccggtaatcacagaccttttcaagaaaattcctgagcaaaactcgtccaagagaggattggcagtgaatgactttttgcaagtgaaaggcagcaacaacattttcgccattggtgacaatgcatttgctgggttgccaccaaccgcccaagtggcgcaccaagaggccgaatatttggccaagaattttgataaaatggctcaaataccaaatttccaaaagaatctatcttcaagaaaggataaaattgatctcttgttcgaggagaacaactttaaacctttcaaatacaacgatttaggtgccttagcatacctgggatccgaaagggccattgcaaccatacgttccggtaagagaacattttacaccggtggtggcttaatgaccttctacttatggagaattttgtacttgtccatgattctatctgcaagatcgagattaaaggtctttttcgactggattaaattagcatttttcaaaagagacttttttaaaggattatag

SEQ ID NO: 628 - DNA, 1542 bp, Artificial Sequence
  source: /note="Description of Artificial Sequence: Synthetic polynucleotide"
atgctatcgaagaatttgtatagtaacaagaggttgctcacctcgacgaatacgctagtcagattcgcttccaccagatccacaggggtggaaaactccggagcaggtcctacatcttttaagaccatgaaagtcattgaccctcagcacagcgacaaaccaaacgtgctgatactgggttcggggtggggagctatttcgtttttaaagcacattgacaccaagaagtacaacgtttccatcatctctcctagaagctatttcttatacacgcctttgttaccttctgcaccagttgggacagtagacgaaaagtcaattattgagcccatcgttaattttgctctcaagaaaaaggggaacgttacctactatgaggcagaagccacctctatcaatcccgacaggaataccgttaccataaaatcattatctgccgttagccagctataccaacctgaaaaccatctagggctgcatcaagcagaacctgctgaaattaagtacgattatttaatcagtgctgtaggtgcggaacctaacacatttggtattcctggggtcactgattacggtcatttcctgaaggaaattcccaactctttggaaataagaagaacttttgccgccaatctagagaaggctaacttattgccaaagggtgatcccgaaagaagaagactactgtccattgtcgtggttggtggtgggcctactggtgtagaggccgctggtgaactacaggattatgttcaccaggacctgagaaagtttctccctgcattggccgaagaagtccaaattcacttggtcgaagctctgcccatcgttttgaatatgtttgagaaaaagctttcatcatacgcgcaatcacatttagaaaacacttcgatcaaagtacatctgagaacggctgtcgccaaagttgaagaaaagcaattgttggcaaagacgaaacacgaagacggtaaaataaccgaagaaactattccatacggtactttgatttgggccacgggtaacaaggcaagaccggtaatcacagaccttttcaagaaaattcctgagcaaaactcgtccaagagaggattggcagtgaatgactttttgcaagtgaaaggcagcaacaacattttcgccattggtgacaatgcatttgctgggttgccaccaaccgcccaagtggcgcaccaagaggccgaatatttggccaagaattttgataaaatggctcaaataccaaatttccaaaagaatctatcttcaagaaaggataaaattgatctcttgttcgaggagaacaactttaaacctttcaaatacaacgatttaggtgccttagcatacctgggatccgaaagggccattgcaaccatacgttccggtaagagaacattttacaccggtggtggcttaatgaccttctacttatggagaattatctacatgtccatgattctatctgcaagatcgagattaaaggtctttttcgactggattaaattagcatttttcaaaagagacttttttaaaggattatag

SEQ ID NO: 629 - DNA, 1542 bp, Artificial Sequence
  source: /note="Description of Artificial Sequence: Synthetic polynucleotide"
atgctatcgaagaatttgtatagtaacaagaggttgctcacctcgacgaatacgctagtcagattcgcttccaccagatccacaggggtggaaaactccggagcaggtcctacatcttttaagaccatgaaaatcattgaccctcagcacagcgacaaaccaaacgtgctgatactgggttcggggtggggagctatttcgtttttaaagcacattgacaccaagaagtacaacgtttccatcatctctcctagaagctatttcttatacacgcctttgttaccttctgcaccagttgggacagtagacgaaaagtcaattattgagcccatcgttaattttgctctcaagaaaaaggggaacgttacctactatgaggcagaagccacctctatcaatcccgacaggaataccgttaccataaaatcattatctgccgttagccagctataccaacctgaaaaccatctagggctgcatcaagcagaacctgctgaaattaagtacgattatttaatcagtgctgtaggtgcggaacctaacacatttggtattcctggggtcactgattacggtcatttcctgaaggaaattcccaactctttggaaataagaagaacttttgccgccaatctagagaaggctaacttattgccaaagggtgatcccgaaagaagaagactactgtccattgtcgtggttggtggtgggcctactggtgtagaggccgctggtgaactacaggattatgttcaccaggacctgagaaagtttctccctgcattggccgaagaagtccaaattcacttggtcgaagctctgcccatcgttttgaatatgtttgagaaaaagctttcatcatacgcgcaatcacatttagaaaacacttcgatcaaagtacatctgagaacggctgtcgccaaagttgaagaaaagcaattgttggcaaagacgaaacacgaagacggtaaaataaccgaagaaactattccatacggtactttgatttgggccacgggtaacaaggcaagaccggtaatcacagaccttttcaagaaaattcctgagcaaaactcgtccaagagaggattggcagtgaatgactttttgcaagtgaaaggcagcaacaacattttcgccattggtgacaatgcatttgctgggttgccaccaaccgcccaagtggcgcaccaagaggccgaatatttggccaagaattttgataaaatggctcaaataccaaatttccaaaagaatctatcttcaagaaaggataaaattgatctcttgttcgaggagaacaactttaaacctttcaaatacaacgatttaggtgccttagcatacctgggatccgaaagggccattgcaaccatacgttccggtaagagaacattttacaccggtggtggcttaatgaccttctacttatggagaattttgtacatgtccatgattctatctgcaagatcgagattaaaggtctttttcgactggattaaattagcatttttcaaaagagacttttttaaaggattatag

SEQ ID NO: 630 - DNA, 1542 bp, Artificial Sequence
  source: /note="Description of Artificial Sequence: Synthetic polynucleotide"
atgctatcgaagaatttgtatagtaacaagaggttgctcacctcgacgaatacgctagtcagattcgcttccaccagatccacaggggtggaaaactccggagcaggtcctacatcttttaagaccatgaaaatcattgaccctcagcacagcgacaaaccaaacgtgctgatactgggttcggggtggggagctatttcgtttttaaagcacattgacaccaagaagtacaacgtttccatcatctctcctagaagctatttcttatacacgcctttgttaccttctgcaccagttgggacagtagacgaaaagtcaattattgagcccatcgttaattttgctctcaagaaaaaggggaacgttacctactatgaggcagaagccacctctatcaatcccgacaggaataccgttaccataaaatcattatctgccgttagccagctataccaacctgaaaaccatctagggctgcatcaagcagaacctgctgaaattaagtacgattatttaatcagtgctgtaggtgcggaacctaacacatttggtattcctggggtcactgattacggtcatttcctgaaggaaattcccaactctttggaaataagaagaacttttgccgccaatctagagaaggctaacttattgccaaagggtgatcccgaaagaagaagactactgtccattgtcgtggttggtggtgggcctactggtgtagaggccgctggtgaactacaggattatgttcaccaggacctgagaaagtttctccctgcattggccgaagaagtccaaattcacttggtcgaagctctgcccatcgttttgaatatgtttgagaaaaagctttcatcatacgcgcaatcacatttagaaaacacttcgatcaaagtacatctgagaacggctgtcgccaaagttgaagaaaagcaattgttggcaaagacgaaacacgaagacggtaaaataaccgaagaaactattccatacggtactttgatttgggccacgggtaacaaggcaagaccggtaatcacagaccttttcaagaaaattcctgagcaaaactcgtccaagagaggattggcagtgaatgactttttgcaagtgaaaggcagcaacaacattttcgccattggtgacaatgcatttgctgggttgccaccaaccgcccaagtggcgcaccaagaggccgaatatttggccaagaattttgataaaatggctcaaataccaaatttccaaaagaatctatcttcaagaaaggataaaattgatctcttgttcgaggagaacaactttaaacctttcaaatacaacgatttaggtgccttagcatacctgggatccgaaagggccattgcaaccatacgttccggtaagagaacattttacaccggtggtggcttaatgaccttctacttatggagaattatctacttgtccatgattctatctgcaagatcgagattaaaggtctttttcgactggattaaattagcatttttcaaaagagacttttttaaaggattatag

SEQ ID NO: 631 - DNA, 1542 bp, Artificial Sequence
  source: /note="Description of Artificial Sequence: Synthetic polynucleotide"
atgctatcgaagaatttgtatagtaacaagaggttgctcacctcgacgaatacgctagtcagattcgcttccaccagatccacaggggtggaaaactccggagcaggtcctacatcttttaagaccatgaaagtcattgaccctcagcacagcgacaaaccaaacgtgctgatactgggttcggggtggggagctatttcgtttttaaagcacattgacaccaagaagtacaacgtttccatcatctctcctagaagctatttcatctttacgcctttgttaccttctgcaccagttgggacagtagacgaaaagtcaattattgagcccatcgttaattttgctctcaagaaaaaggggaacgttacctactatgaggcagaagccacctctatcaatcccgacaggaataccgttaccataaaatcattatctgccgttagccagctataccaacctgaaaaccatctagggctgcatcaagcagaacctgctgaaattaagtacgattatttaatcagtgctgtaggtgcggaacctaacacatttggtattcctggggtcactgattacggtcatttcctgaaggaaattcccaactctttggaaataagaagaacttttgccgccaatctagagaaggctaacttattgccaaagggtgatcccgaaagaagaagactactgtccattgtcgtggttggtggtgggcctactggtgtagaggccgctggtgaactacaggattatgttcaccaggacctgagaaagtttctccctgcattggccgaagaaatccaaattcacttggtcgaagctctgcccatcgttttgaatatgtttgagaaaaagctttcatcatacgcgcaatcacatttagaaaacacttcgatcaaagtacatctgagaacggctgtcgccaaagttgaagaaaagcaattgttggcaaagacgaaacacgaagacggtaaaataaccgaagaaactattccatacggtactttgatttgggccacgggtaacaaggcaagaccggtaatcacagaccttttcaagaaaattcctgagcaaaactcgtccaagagaggattggcagtgaatgactttttgcaagtgaaaggcagcaacaacattttcgccattggtgacaatgcatttgctgggttgccaccaaccgcccaagtggcgcaccaagaggccgaatatttggccaagaattttgataaaatggctcaaataccaaatttccaaaagaatctatcttcaagaaaggataaaattgatctcttgttcgaggagaacaactttaaacctttcaaatacaacgatttaggtgccttagcatacctgggatccgaaagggccattgcaaccatacgttccggtaagagaacattttacaccggtggtggcttaatgaccttctacttatggagaattttgtacatgtccatgattctatctgcaagatcgagattaaaggtctttttcgactggattaaattagcatttttcaaaagagacttttttaaaggattatag

SEQ ID NO: 632 - DNA, 1542 bp, Artificial Sequence
  source: /note="Description of Artificial Sequence: Synthetic polynucleotide"
atgctatcgaagaatttgtatagtaacaagaggttgctcacctcgacgaatacgctagtcagattcgcttccaccagatccacaggggtggaaaactccggagcaggtcctacatcttttaagaccatgaaagtcattgaccctcagcacagcgacaaaccaaacgtgctgatactgggttcggggtggggagctatttcgtttttaaagcacattgacaccaagaagtacaacgtttccatcatctctcctagaagctatttcatctttacgcctttgttaccttctgcaccagttgggacagtagacgaaaagtcaattattgagcccatcgttaattttgctctcaagaaaaaggggaacgttacctactatgaggcagaagccacctctatcaatcccgacaggaataccgttaccataaaatcattatctgccgttagccagctataccaacctgaaaaccatctagggctgcatcaagcagaacctgctgaaattaagtacgattatttaatcagtgctgtaggtgcggaacctaacacatttggtattcctggggtcactgattacggtcatttcctgaaggaaattcccaactctttggaaataagaagaacttttgccgccaatctagagaaggctaacttattgccaaagggtgatcccgaaagaagaagactactgtccattgtcgtggttggtggtgggcctactggtgtagaggccgctggtgaactacaggattatgttcaccaggacctgagaaagtttctccctgcattggccgaagaaatccaaattcacttggtcgaagctctgcccatcgttttgaatatgtttgagaaaaagctttcatcatacgcgcaatcacatttagaaaacacttcgatcaaagtacatctgagaacggctgtcgccaaagttgaagaaaagcaattgttggcaaagacgaaacacgaagacggtaaaataaccgaagaaactattccatacggtactttgatttgggccacgggtaacaaggcaagaccggtaatcacagaccttttcaagaaaattcctgagcaaaactcgtccaagagaggattggcagtgaatgactttttgcaagtgaaaggcagcaacaacattttcgccattggtgacaatgcatttgctgggttgccaccaaccgcccaagtggcgcaccaagaggccgaatatttggccaagaattttgataaaatggctcaaataccaaatttccaaaagaatctatcttcaagaaaggataaaattgatctcttgttcgaggagaacaactttaaacctttcaaatacaacgatttaggtgccttagcatacctgggatccgaaagggccattgcaaccatacgttccggtaagagaacattttacaccggtggtggcttaatgaccttctacttatggagaattatctacttgtccatgattctatctgcaagatcgagattaaaggtctttttcgactggattaaattagcatttttcaaaagagacttttttaaaggattatag

SEQ ID NO: 633 - DNA, 1542 bp, Artificial Sequence
  source: /note="Description of Artificial Sequence: Synthetic polynucleotide"
atgctatcgaagaatttgtatagtaacaagaggttgctcacctcgacgaatacgctagtcagattcgcttccaccagatccacaggggtggaaaactccggagcaggtcctacatcttttaagaccatgaaaatcattgaccctcagcacagcgacaaaccaaacgtgctgatactgggttcggggtggggagctatttcgtttttaaagcacattgacaccaagaagtacaacgtttccatcatctctcctagaagctatttcatctttacgcctttgttaccttctgcaccagttgggacagtagacgaaaagtcaattattgagcccatcgttaattttgctctcaagaaaaaggggaacgttacctactatgaggcagaagccacctctatcaatcccgacaggaataccgttaccataaaatcattatctgccgttagccagctataccaacctgaaaaccatctagggctgcatcaagcagaacctgctgaaattaagtacgattatttaatcagtgctgtaggtgcggaacctaacacatttggtattcctggggtcactgattacggtcatttcctgaaggaaattcccaactctttggaaataagaagaacttttgccgccaatctagagaaggctaacttattgccaaagggtgatcccgaaagaagaagactactgtccattgtcgtggttggtggtgggcctactggtgtagaggccgctggtgaactacaggattatgttcaccaggacctgagaaagtttctccctgcattggccgaagaaatccaaattcacttggtcgaagctctgcccatcgttttgaatatgtttgagaaaaagctttcatcatacgcgcaatcacatttagaaaacacttcgatcaaagtacatctgagaacggctgtcgccaaagttgaagaaaagcaattgttggcaaagacgaaacacgaagacggtaaaataaccgaagaaactattccatacggtactttgatttgggccacgggtaacaaggcaagaccggtaatcacagaccttttcaagaaaattcctgagcaaaactcgtccaagagaggattggcagtgaatgactttttgcaagtgaaaggcagcaacaacattttcgccattggtgacaatgcatttgctgggttgccaccaaccgcccaagtggcgcaccaagaggccgaatatttggccaagaattttgataaaatggctcaaataccaaatttccaaaagaatctatcttcaagaaaggataaaattgatctcttgttcgaggagaacaactttaaacctttcaaatacaacgatttaggtgccttagcatacctgggatccgaaagggccattgcaaccatacgttccggtaagagaacattttacaccggtggtggcttaatgaccttctacttatggagaattttgtacttgtccatgattctatctgcaagatcgagattaaaggtctttttcgactggattaaattagcatttttcaaaagagacttttttaaaggattatag

SEQ ID NO: 634 - DNA, 1542 bp, Artificial Sequence
  source: /note="Description of Artificial Sequence: Synthetic polynucleotide"
atgctatcgaagaatttgtatagtaacaagaggttgctcacctcgacgaatacgctagtcagattcgcttccaccagatccacaggggtggaaaactccggagcaggtcctacatcttttaagaccatgaaagtcattgaccctcagcacagcgacaaaccaaacgtgctgatactgggttcggggtggggagctatttcgtttttaaagcacattgacaccaagaagtacaacgtttccatcatctctcctagaagctatttcatctttacgcctttgttaccttctgcaccagttgggacagtagacgaaaagtcaattattgagcccatcgttaattttgctctcaagaaaaaggggaacgttacctactatgaggcagaagccacctctatcaatcccgacaggaataccgttaccataaaatcattatctgccgttagccagctataccaacctgaaaaccatctagggctgcatcaagcagaacctgctgaaattaagtacgattatttaatcagtgctgtaggtgcggaacctaacacatttggtattcctggggtcactgattacggtcatttcctgaaggaaattcccaactctttggaaataagaagaacttttgccgccaatctagagaaggctaacttattgccaaagggtgatcccgaaagaagaagactactgtccattgtcgtggttggtggtgggcctactggtgtagaggccgctggtgaactacaggattatgttcaccaggacctgagaaagtttctccctgcattggccgaagaagtccaaattcacttggtcgaagctctgcccatcgttttgaatatgtttgagaaaaagctttcatcatacgcgcaatcacatttagaaaacacttcgatcaaagtacatctgagaacggctgtcgccaaagttgaagaaaagcaattgttggcaaagacgaaacacgaagacggtaaaataaccgaagaaactattccatacggtactttgatttgggccacgggtaacaaggcaagaccggtaatcacagaccttttcaagaaaattcctgagcaaaactcgtccaagagaggattggcagtgaatgactttttgcaagtgaaaggcagcaacaacattttcgccattggtgacaatgcatttgctgggttgccaccaaccgcccaagtggcgcaccaagaggccgaatatttggccaagaattttgataaaatggctcaaataccaaatttccaaaagaatctatcttcaagaaaggataaaattgatctcttgttcgaggagaacaactttaaacctttcaaatacaacgatttaggtgccttagcatacctgggatccgaaagggccattgcaaccatacgttccggtaagagaacattttacaccggtggtggcttaatgaccttctacttatggagaattatctacatgtccatgattctatctgcaagatcgagattaaaggtctttttcgactggattaaattagcatttttcaaaagagacttttttaaaggattatag

SEQ ID NO: 635 - DNA, 1542 bp, Artificial Sequence
  source: /note="Description of Artificial Sequence: Synthetic polynucleotide"
atgctatcgaagaatttgtatagtaacaagaggttgctcacctcgacgaatacgctagtcagattcgcttccaccagatccacaggggtggaaaactccggagcaggtcctacatcttttaagaccatgaaaatcattgaccctcagcacagcgacaaaccaaacgtgctgatactgggttcggggtggggagctatttcgtttttaaagcacattgacaccaagaagtacaacgtttccatcatctctcctagaagctatttcatctttacgcctttgttaccttctgcaccagttgggacagtagacgaaaagtcaattattgagcccatcgttaattttgctctcaagaaaaaggggaacgttacctactatgaggcagaagccacctctatcaatcccgacaggaataccgttaccataaaatcattatctgccgttagccagctataccaacctgaaaaccatctagggctgcatcaagcagaacctgctgaaattaagtacgattatttaatcagtgctgtaggtgcggaacctaacacatttggtattcctggggtcactgattacggtcatttcctgaaggaaattcccaactctttggaaataagaagaacttttgccgccaatctagagaaggctaacttattgccaaagggtgatcccgaaagaagaagactactgtccattgtcgtggttggtggtgggcctactggtgtagaggccgctggtgaactacaggattatgttcaccaggacctgagaaagtttctccctgcattggccgaagaagtccaaattcacttggtcgaagctctgcccatcgttttgaatatgtttgagaaaaagctttcatcatacgcgcaatcacatttagaaaacacttcgatcaaagtacatctgagaacggctgtcgccaaagttgaagaaaagcaattgttggcaaagacgaaacacgaagacggtaaaataaccgaagaaactattccatacggtactttgatttgggccacgggtaacaaggcaagaccggtaatcacagaccttttcaagaaaattcctgagcaaaactcgtccaagagaggattggcagtgaatgactttttgcaagtgaaaggcagcaacaacattttcgccattggtgacaatgcatttgctgggttgccaccaaccgcccaagtggcgcaccaagaggccgaatatttggccaagaattttgataaaatggctcaaataccaaatttccaaaagaatctatcttcaagaaaggataaaattgatctcttgttcgaggagaacaactttaaacctttcaaatacaacgatttaggtgccttagcatacctgggatccgaaagggccattgcaaccatacgttccggtaagagaacattttacaccggtggtggcttaatgaccttctacttatggagaattttgtacatgtccatgattctatctgcaagatcgagattaaaggtctttttcgactggattaaattagcatttttcaaaagagacttttttaaaggattatag

SEQ ID NO: 636 - DNA, 1542 bp, Artificial Sequence
  source: /note="Description of Artificial Sequence: Synthetic polynucleotide"
atgctatcgaagaatttgtatagtaacaagaggttgctcacctcgacgaatacgctagtcagattcgcttccaccagatccacaggggtggaaaactccggagcaggtcctacatcttttaagaccatgaaaatcattgaccctcagcacagcgacaaaccaaacgtgctgatactgggttcggggtggggagctatttcgtttttaaagcacattgacaccaagaagtacaacgtttccatcatctctcctagaagctatttcatctttacgcctttgttaccttctgcaccagttgggacagtagacgaaaagtcaattattgagcccatcgttaattttgctctcaagaaaaaggggaacgttacctactatgaggcagaagccacctctatcaatcccgacaggaataccgttaccataaaatcattatctgccgttagccagctataccaacctgaaaaccatctagggctgcatcaagcagaacctgctgaaattaagtacgattatttaatcagtgctgtaggtgcggaacctaacacatttggtattcctggggtcactgattacggtcatttcctgaaggaaattcccaactctttggaaataagaagaacttttgccgccaatctagagaaggctaacttattgccaaagggtgatcccgaaagaagaagactactgtccattgtcgtggttggtggtgggcctactggtgtagaggccgctggtgaactacaggattatgttcaccaggacctgagaaagtttctccctgcattggccgaagaagtccaaattcacttggtcgaagctctgcccatcgttttgaatatgtttgagaaaaagctttcatcatacgcgcaatcacatttagaaaacacttcgatcaaagtacatctgagaacggctgtcgccaaagttgaagaaaagcaattgttggcaaagacgaaacacgaagacggtaaaataaccgaagaaactattccatacggtactttgatttgggccacgggtaacaaggcaagaccggtaatcacagaccttttcaagaaaattcctgagcaaaactcgtccaagagaggattggcagtgaatgactttttgcaagtgaaaggcagcaacaacattttcgccattggtgacaatgcatttgctgggttgccaccaaccgcccaagtggcgcaccaagaggccgaatatttggccaagaattttgataaaatggctcaaataccaaatttccaaaagaatctatcttcaagaaaggataaaattgatctcttgttcgaggagaacaactttaaacctttcaaatacaacgatttaggtgccttagcatacctgggatccgaaagggccattgcaaccatacgttccggtaagagaacattttacaccggtggtggcttaatgaccttctacttatggagaattatctacttgtccatgattctatctgcaagatcgagattaaaggtctttttcgactggattaaattagcatttttcaaaagagacttttttaaaggattatag

SEQ ID NO: 637 - DNA, 1542 bp, Artificial Sequence
  source: /note="Description of Artificial Sequence: Synthetic polynucleotide"
atgctatcgaagaatttgtatagtaacaagaggttgctcacctcgacgaatacgctagtcagattcgcttccaccagatccacaggggtggaaaactccggagcaggtcctacatcttttaagaccatgaaagtcattgaccctcagcacagcgacaaaccaaacgtgctgatactgggttcggggtggggagctatttcgtttttaaagcacattgacaccaagaagtacaacgtttccatcatctctcctagaagctatttcttatttacgcctttgttaccttctgcaccagttgggacagtagacgaaaagtcaattattgagcccatcgttaattttgctctcaagaaaaaggggaacgttacctactatgaggcagaagccacctctatcaatcccgacaggaataccgttaccataaaatcattatctgccgttagccagctataccaacctgaaaaccatctagggctgcatcaagcagaacctgctgaaattaagtacgattatttaatcagtgctgtaggtgcggaacctaacacatttggtattcctggggtcactgattacggtcatttcctgaaggaaattcccaactctttggaaataagaagaacttttgccgccaatctagagaaggctaacttattgccaaagggtgatcccgaaagaagaagactactgtccattgtcgtggttggtggtgggcctactggtgtagaggccgctggtgaactacaggattatgttcaccaggacctgagaaagtttctccctgcattggccgaagaaatccaaattcacttggtcgaagctctgcccatcgttttgaatatgtttgagaaaaagctttcatcatacgcgcaatcacatttagaaaacacttcgatcaaagtacatctgagaacggctgtcgccaaagttgaagaaaagcaattgttggcaaagacgaaacacgaagacggtaaaataaccgaagaaactattccatacggtactttgatttgggccacgggtaacaaggcaagaccggtaatcacagaccttttcaagaaaattcctgagcaaaactcgtccaagagaggattggcagtgaatgactttttgcaagtgaaaggcagcaacaacattttcgccattggtgacaatgcatttgctgggttgccaccaaccgcccaagtggcgcaccaagaggccgaatatttggccaagaattttgataaaatggctcaaataccaaatttccaaaagaatctatcttcaagaaaggataaaattgatctcttgttcgaggagaacaactttaaacctttcaaatacaacgatttaggtgccttagcatacctgggatccgaaagggccattgcaaccatacgttccggtaagagaacattttacaccggtggtggcttaatgaccttctacttatggagaattatctacatgtccatgattctatctgcaagatcgagattaaaggtctttttcgactggattaaattagcatttttcaaaagagacttttttaaaggattatag

SEQ ID NO: 638 - DNA, 1542 bp, Artificial Sequence
  source: /note="Description of Artificial Sequence: Synthetic polynucleotide"
atgctatcgaagaatttgtatagtaacaagaggttgctcacctcgacgaatacgctagtcagattcgcttccaccagatccacaggggtggaaaactccggagcaggtcctacatcttttaagaccatgaaaatcattgaccctcagcacagcgacaaaccaaacgtgctgatactgggttcggggtggggagctatttcgtttttaaagcacattgacaccaagaagtacaacgtttccatcatctctcctagaagctatttcttatttacgcctttgttaccttctgcaccagttgggacagtagacgaaaagtcaattattgagcccatcgttaattttgctctcaagaaaaaggggaacgttacctactatgaggcagaagccacctctatcaatcccgacaggaataccgttaccataaaatcattatctgccgttagccagctataccaacctgaaaaccatctagggctgcatcaagcagaacctgctgaaattaagtacgattatttaatcagtgctgtaggtgcggaacctaacacatttggtattcctggggtcactgattacggtcatttcctgaaggaaattcccaactctttggaaataagaagaacttttgccgccaatctagagaaggctaacttattgccaaagggtgatcccgaaagaagaagactactgtccattgtcgtggttggtggtgggcctactggtgtagaggccgctggtgaactacaggattatgttcaccaggacctgagaaagtttctccctgcattggccgaagaaatccaaattcacttggtcgaagctctgcccatcgttttgaatatgtttgagaaaaagctttcatcatacgcgcaatcacatttagaaaacacttcgatcaaagtacatctgagaacggctgtcgccaaagttgaagaaaagcaattgttggcaaagacgaaacacgaagacggtaaaataaccgaagaaactattccatacggtactttgatttgggccacgggtaacaaggcaagaccggtaatcacagaccttttcaagaaaattcctgagcaaaactcgtccaagagaggattggcagtgaatgactttttgcaagtgaaaggcagcaacaacattttcgccattggtgacaatgcatttgctgggttgccaccaaccgcccaagtggcgcaccaagaggccgaatatttggccaagaattttgataaaatggctcaaataccaaatttccaaaagaatctatcttcaagaaaggataaaattgatctcttgttcgaggagaacaactttaaacctttcaaatacaacgatttaggtgccttagcatacctgggatccgaaagggccattgcaaccatacgttccggtaagagaacattttacaccggtggtggcttaatgaccttctacttatggagaattttgtacatgtccatgattctatctgcaagatcgagattaaaggtctttttcgactggattaaattagcatttttcaaaagagacttttttaaaggattatag

SEQ ID NO: 639 - DNA, 1542 bp, Artificial Sequence
  source: /note="Description of Artificial Sequence: Synthetic polynucleotide"
atgctatcgaagaatttgtatagtaacaagaggttgctcacctcgacgaatacgctagtcagattcgcttccaccagatccacaggggtggaaaactccggagcaggtcctacatcttttaagaccatgaaaatcattgaccctcagcacagcgacaaaccaaacgtgctgatactgggttcggggtggggagctatttcgtttttaaagcacattgacaccaagaagtacaacgtttccatcatctctcctagaagctatttcttatttacgcctttgttaccttctgcaccagttgggacagtagacgaaaagtcaattattgagcccatcgttaattttgctctcaagaaaaaggggaacgttacctactatgaggcagaagccacctctatcaatcccgacaggaataccgttaccataaaatcattatctgccgttagccagctataccaacctgaaaaccatctagggctgcatcaagcagaacctgctgaaattaagtacgattatttaatcagtgctgtaggtgcggaacctaacacatttggtattcctggggtcactgattacggtcatttcctgaaggaaattcccaactctttggaaataagaagaacttttgccgccaatctagagaaggctaacttattgccaaagggtgatcccgaaagaagaagactactgtccattgtcgtggttggtggtgggcctactggtgtagaggccgctggtgaactacaggattatgttcaccaggacctgagaaagtttctccctgcattggccgaagaaatccaaattcacttggtcgaagctctgcccatcgttttgaatatgtttgagaaaaagctttcatcatacgcgcaatcacatttagaaaacacttcgatcaaagtacatctgagaacggctgtcgccaaagttgaagaaaagcaattgttggcaaagacgaaacacgaagacggtaaaataaccgaagaaactattccatacggtactttgatttgggccacgggtaacaaggcaagaccggtaatcacagaccttttcaagaaaattcctgagcaaaactcgtccaagagaggattggcagtgaatgactttttgcaagtgaaaggcagcaacaacattttcgccattggtgacaatgcatttgctgggttgccaccaaccgcccaagtggcgcaccaagaggccgaatatttggccaagaattttgataaaatggctcaaataccaaatttccaaaagaatctatcttcaagaaaggataaaattgatctcttgttcgaggagaacaactttaaacctttcaaatacaacgatttaggtgccttagcatacctgggatccgaaagggccattgcaaccatacgttccggtaagagaacattttacaccggtggtggcttaatgaccttctacttatggagaattatctacttgtccatgattctatctgcaagatcgagattaaaggtctttttcgactggattaaattagcatttttcaaaagagacttttttaaaggattatag

SEQ ID NO: 640 - DNA, 1542 bp, Artificial Sequence
  source: /note="Description of Artificial Sequence: Synthetic polynucleotide"
atgctatcgaagaatttgtatagtaacaagaggttgctcacctcgacgaatacgctagtcagattcgcttccaccagatccacaggggtggaaaactccggagcaggtcctacatcttttaagaccatgaaaatcattgaccctcagcacagcgacaaaccaaacgtgctgatactgggttcggggtggggagctatttcgtttttaaagcacattgacaccaagaagtacaacgtttccatcatctctcctagaagctatttcttatttacgcctttgttaccttctgcaccagttgggacagtagacgaaaagtcaattattgagcccatcgttaattttgctctcaagaaaaaggggaacgttacctactatgaggcagaagccacctctatcaatcccgacaggaataccgttaccataaaatcattatctgccgttagccagctataccaacctgaaaaccatctagggctgcatcaagcagaacctgctgaaattaagtacgattatttaatcagtgctgtaggtgcggaacctaacacatttggtattcctggggtcactgattacggtcatttcctgaaggaaattcccaactctttggaaataagaagaacttttgccgccaatctagagaaggctaacttattgccaaagggtgatcccgaaagaagaagactactgtccattgtcgtggttggtggtgggcctactggtgtagaggccgctggtgaactacaggattatgttcaccaggacctgagaaagtttctccctgcattggccgaagaagtccaaattcacttggtcgaagctctgcccatcgttttgaatatgtttgagaaaaagctttcatcatacgcgcaatcacatttagaaaacacttcgatcaaagtacatctgagaacggctgtcgccaaagttgaagaaaagcaattgttggcaaagacgaaacacgaagacggtaaaataaccgaagaaactattccatacggtactttgatttgggccacgggtaacaaggcaagaccggtaatcacagaccttttcaagaaaattcctgagcaaaactcgtccaagagaggattggcagtgaatgactttttgcaagtgaaaggcagcaacaacattttcgccattggtgacaatgcatttgctgggttgccaccaaccgcccaagtggcgcaccaagaggccgaatatttggccaagaattttgataaaatggctcaaataccaaatttccaaaagaatctatcttcaagaaaggataaaattgatctcttgttcgaggagaacaactttaaacctttcaaatacaacgatttaggtgccttagcatacctgggatccgaaagggccattgcaaccatacgttccggtaagagaacattttacaccggtggtggcttaatgaccttctacttatggagaattatctacatgtccatgattctatctgcaagatcgagattaaaggtctttttcgactggattaaattagcatttttcaaaagagacttttttaaaggattatag

SEQ ID NO: 641 - DNA, 1542 bp, Artificial Sequence
  source: /note="Description of Artificial Sequence: Synthetic polynucleotide"
atgctatcgaagaatttgtatagtaacaagaggttgctcacctcgacgaatacgctagtcagattcgcttccaccagatccacaggggtggaaaactccggagcaggtcctacatcttttaagaccatgaaagtcattgaccctcagcacagcgacaaaccaaacgtgctgatactgggttcggggtggggagctatttcgtttttaaagcacattgacaccaagaagtacaacgtttccatcgtgtctcctagaagctatttcatctacacgcctttgttaccttctgcaccagttgggacagtagacgaaaagtcaattattgagcccatcgttaattttgctctcaagaaaaaggggaacgttacctactatgaggcagaagccacctctatcaatcccgacaggaataccgttaccataaaatcattatctgccgttagccagctataccaacctgaaaaccatctagggctgcatcaagcagaacctgctgaaattaagtacgattatttaatcagtgctgtaggtgcggaacctaacacatttggtattcctggggtcactgattacggtcatttcctgaaggaaattcccaactctttggaaataagaagaacttttgccgccaatctagagaaggctaacttattgccaaagggtgatcccgaaagaagaagactactgtccattgtcgtggttggtggtgggcctactggtgtagaggccgctggtgaactacaggattatgttcaccaggacctgagaaagtttctccctgcattggccgaagaaatccaaattcacttggtcgaagctctgcccatcgttttgaatatgtttgagaaaaagctttcatcatacgcgcaatcacatttagaaaacacttcgatcaaagtacatctgagaacggctgtcgccaaagttgaagaaaagcaattgttggcaaagacgaaacacgaagacggtaaaataaccgaagaaactattccatacggtactttgatttgggccacgggtaacaaggcaagaccggtaatcacagaccttttcaagaaaattcctgagcaaaactcgtccaagagaggattggcagtgaatgactttttgcaagtgaaaggcagcaacaacattttcgccattggtgacaatgcatttgctgggttgccaccaaccgcccaagtggcgcaccaagaggccgaatatttggccaagaattttgataaaatggctcaaataccaaatttccaaaagaatctatcttcaagaaaggataaaattgatctcttgttcgaggagaacaactttaaacctttcaaatacaacgatttaggtgccttagcatacctgggatccgaaagggccattgcaaccatacgttccggtaagagaacattttacaccggtggtggcttaatgaccttctacttatggagaattttgtacttgtccatgattctatctgcaagatcgagattaaaggtctttttcgactggattaaattagcatttttcaaaagagacttttttaaaggattatag

SEQ ID NO: 642 - DNA, 1542 bp, Artificial Sequence
  source: /note="Description of Artificial Sequence: Synthetic polynucleotide"
atgctatcgaagaatttgtatagtaacaagaggttgctcacctcgacgaatacgctagtcagattcgcttccaccagatccacaggggtggaaaactccggagcaggtcctacatcttttaagaccatgaaagtcattgaccctcagcacagcgacaaaccaaacgtgctgatactgggttcggggtggggagctatttcgtttttaaagcacattgacaccaagaagtacaacgtttccatcgtgtctcctagaagctatttcatctacacgcctttgttaccttctgcaccagttgggacagtagacgaaaagtcaattattgagcccatcgttaattttgctctcaagaaaaaggggaacgttacctactatgaggcagaagccacctctatcaatcccgacaggaataccgttaccataaaatcattatctgccgttagccagctataccaacctgaaaaccatctagggctgcatcaagcagaacctgctgaaattaagtacgattatttaatcagtgctgtaggtgcggaacctaacacatttggtattcctggggtcactgattacggtcatttcctgaaggaaattcccaactctttggaaataagaagaacttttgccgccaatctagagaaggctaacttattgccaaagggtgatcccgaaagaagaagactactgtccattgtcgtggttggtggtgggcctactggtgtagaggccgctggtgaactacaggattatgttcaccaggacctgagaaagtttctccctgcattggccgaagaagtccaaattcacttggtcgaagctctgcccatcgttttgaatatgtttgagaaaaagctttcatcatacgcgcaatcacatttagaaaacacttcgatcaaagtacatctgagaacggctgtcgccaaagttgaagaaaagcaattgttggcaaagacgaaacacgaagacggtaaaataaccgaagaaactattccatacggtactttgatttgggccacgggtaacaaggcaagaccggtaatcacagaccttttcaagaaaattcctgagcaaaactcgtccaagagaggattggcagtgaatgactttttgcaagtgaaaggcagcaacaacattttcgccattggtgacaatgcatttgctgggttgccaccaaccgcccaagtggcgcaccaagaggccgaatatttggccaagaattttgataaaatggctcaaataccaaatttccaaaagaatctatcttcaagaaaggataaaattgatctcttgttcgaggagaacaactttaaacctttcaaatacaacgatttaggtgccttagcatacctgggatccgaaagggccattgcaaccatacgttccggtaagagaacattttacaccggtggtggcttaatgaccttctacttatggagaattttgtacatgtccatgattctatctgcaagatcgagattaaaggtctttttcgactggattaaattagcatttttcaaaagagacttttttaaaggattatag

SEQ ID NO: 643 - DNA, 1542 bp, Artificial Sequence
  source: /note="Description of Artificial Sequence: Synthetic polynucleotide"
atgctatcgaagaatttgtatagtaacaagaggttgctcacctcgacgaatacgctagtcagattcgcttccaccagatccacaggggtggaaaactccggagcaggtcctacatcttttaagaccatgaaagtcattgaccctcagcacagcgacaaaccaaacgtgctgatactgggttcggggtggggagctatttcgtttttaaagcacattgacaccaagaagtacaacgtttccatcgtgtctcctagaagctatttcatctacacgcctttgttaccttctgcaccagttgggacagtagacgaaaagtcaattattgagcccatcgttaattttgctctcaagaaaaaggggaacgttacctactatgaggcagaagccacctctatcaatcccgacaggaataccgttaccataaaatcattatctgccgttagccagctataccaacctgaaaaccatctagggctgcatcaagcagaacctgctgaaattaagtacgattatttaatcagtgctgtaggtgcggaacctaacacatttggtattcctggggtcactgattacggtcatttcctgaaggaaattcccaactctttggaaataagaagaacttttgccgccaatctagagaaggctaacttattgccaaagggtgatcccgaaagaagaagactactgtccattgtcgtggttggtggtgggcctactggtgtagaggccgctggtgaactacaggattatgttcaccaggacctgagaaagtttctccctgcattggccgaagaagtccaaattcacttggtcgaagctctgcccatcgttttgaatatgtttgagaaaaagctttcatcatacgcgcaatcacatttagaaaacacttcgatcaaagtacatctgagaacggctgtcgccaaagttgaagaaaagcaattgttggcaaagacgaaacacgaagacggtaaaataaccgaagaaactattccatacggtactttgatttgggccacgggtaacaaggcaagaccggtaatcacagaccttttcaagaaaattcctgagcaaaactcgtccaagagaggattggcagtgaatgactttttgcaagtgaaaggcagcaacaacattttcgccattggtgacaatgcatttgctgggttgccaccaaccgcccaagtggcgcaccaagaggccgaatatttggccaagaattttgataaaatggctcaaataccaaatttccaaaagaatctatcttcaagaaaggataaaattgatctcttgttcgaggagaacaactttaaacctttcaaatacaacgatttaggtgccttagcatacctgggatccgaaagggccattgcaaccatacgttccggtaagagaacattttacaccggtggtggcttaatgaccttctacttatggagaattatctacttgtccatgattctatctgcaagatcgagattaaaggtctttttcgactggattaaattagcatttttcaaaagagacttttttaaaggattatag

SEQ ID NO: 644 - DNA, 1542 bp, Artificial Sequence
  source: /note="Description of Artificial Sequence: Synthetic polynucleotide"
atgctatcgaagaatttgtatagtaacaagaggttgctcacctcgacgaatacgctagtcagattcgcttccaccagatccacaggggtggaaaactccggagcaggtcctacatcttttaagaccatgaaaatcattgaccctcagcacagcgacaaaccaaacgtgctgatactgggttcggggtggggagctatttcgtttttaaagcacattgacaccaagaagtacaacgtttccatcgtgtctcctagaagctatttcatctacacgcctttgttaccttctgcaccagttgggacagtagacgaaaagtcaattattgagcccatcgttaattttgctctcaagaaaaaggggaacgttacctactatgaggcagaagccacctctatcaatcccgacaggaataccgttaccataaaatcattatctgccgttagccagctataccaacctgaaaaccatctagggctgcatcaagcagaacctgctgaaattaagtacgattatttaatcagtgctgtaggtgcggaacctaacacatttggtattcctggggtcactgattacggtcatttcctgaaggaaattcccaactctttggaaataagaagaacttttgccgccaatctagagaaggctaacttattgccaaagggtgatcccgaaagaagaagactactgtccattgtcgtggttggtggtgggcctactggtgtagaggccgctggtgaactacaggattatgttcaccaggacctgagaaagtttctccctgcattggccgaagaagtccaaattcacttggtcgaagctctgcccatcgttttgaatatgtttgagaaaaagctttcatcatacgcgcaatcacatttagaaaacacttcgatcaaagtacatctgagaacggctgtcgccaaagttgaagaaaagcaattgttggcaaagacgaaacacgaagacggtaaaataaccgaagaaactattccatacggtactttgatttgggccacgggtaacaaggcaagaccggtaatcacagaccttttcaagaaaattcctgagcaaaactcgtccaagagaggattggcagtgaatgactttttgcaagtgaaaggcagcaacaacattttcgccattggtgacaatgcatttgctgggttgccaccaaccgcccaagtggcgcaccaagaggccgaatatttggccaagaattttgataaaatggctcaaataccaaatttccaaaagaatctatcttcaagaaaggataaaattgatctcttgttcgaggagaacaactttaaacctttcaaatacaacgatttaggtgccttagcatacctgggatccgaaagggccattgcaaccatacgttccggtaagagaacattttacaccggtggtggcttaatgaccttctacttatggagaattttgtacttgtccatgattctatctgcaagatcgagattaaaggtctttttcgactggattaaattagcatttttcaaaagagacttttttaaaggattatag

SEQ ID NO: 645 - DNA, 1542 bp, Artificial Sequence
  source: /note="Description of Artificial Sequence: Synthetic polynucleotide"
atgctatcgaagaatttgtatagtaacaagaggttgctcacctcgacgaatacgctagtcagattcgcttccaccagatccacaggggtggaaaactccggagcaggtcctacatcttttaagaccatgaaagtcattgaccctcagcacagcgacaaaccaaacgtgctgatactgggttcggggtggggagctatttcgtttttaaagcacattgacaccaagaagtacaacgtttccatcgtgtctcctagaagctatttcttatacacgcctttgttaccttctgcaccagttgggacagtagacgaaaagtcaattattgagcccatcgttaattttgctctcaagaaaaaggggaacgttacctactatgaggcagaagccacctctatcaatcccgacaggaataccgttaccataaaatcattatctgccgttagccagctataccaacctgaaaaccatctagggctgcatcaagcagaacctgctgaaattaagtacgattatttaatcagtgctgtaggtgcggaacctaacacatttggtattcctggggtcactgattacggtcatttcctgaaggaaattcccaactctttggaaataagaagaacttttgccgccaatctagagaaggctaacttattgccaaagggtgatcccgaaagaagaagactactgtccattgtcgtggttggtggtgggcctactggtgtagaggccgctggtgaactacaggattatgttcaccaggacctgagaaagtttctccctgcattggccgaagaaatccaaattcacttggtcgaagctctgcccatcgttttgaatatgtttgagaaaaagctttcatcatacgcgcaatcacatttagaaaacacttcgatcaaagtacatctgagaacggctgtcgccaaagttgaagaaaagcaattgttggcaaagacgaaacacgaagacggtaaaataaccgaagaaactattccatacggtactttgatttgggccacgggtaacaaggcaagaccggtaatcacagaccttttcaagaaaattcctgagcaaaactcgtccaagagaggattggcagtgaatgactttttgcaagtgaaaggcagcaacaacattttcgccattggtgacaatgcatttgctgggttgccaccaaccgcccaagtggcgcaccaagaggccgaatatttggccaagaattttgataaaatggctcaaataccaaatttccaaaagaatctatcttcaagaaaggataaaattgatctcttgttcgaggagaacaactttaaacctttcaaatacaacgatttaggtgccttagcatacctgggatccgaaagggccattgcaaccatacgttccggtaagagaacattttacaccggtggtggcttaatgaccttctacttatggagaattttgtacatgtccatgattctatctgcaagatcgagattaaaggtctttttcgactggattaaattagcatttttcaaaagagacttttttaaaggattatag

SEQ ID NO: 646 - DNA, 1542 bp, Artificial Sequence
  source: /note="Description of Artificial Sequence: Synthetic polynucleotide"
atgctatcgaagaatttgtatagtaacaagaggttgctcacctcgacgaatacgctagtcagattcgcttccaccagatccacaggggtggaaaactccggagcaggtcctacatcttttaagaccatgaaagtcattgaccctcagcacagcgacaaaccaaacgtgctgatactgggttcggggtggggagctatttcgtttttaaagcacattgacaccaagaagtacaacgtttccatcgtgtctcctagaagctatttcttatacacgcctttgttaccttctgcaccagttgggacagtagacgaaaagtcaattattgagcccatcgttaattttgctctcaagaaaaaggggaacgttacctactatgaggcagaagccacctctatcaatcccgacaggaataccgttaccataaaatcattatctgccgttagccagctataccaacctgaaaaccatctagggctgcatcaagcagaacctgctgaaattaagtacgattatttaatcagtgctgtaggtgcggaacctaacacatttggtattcctggggtcactgattacggtcatttcctgaaggaaattcccaactctttggaaataagaagaacttttgccgccaatctagagaaggctaacttattgccaaagggtgatcccgaaagaagaagactactgtccattgtcgtggttggtggtgggcctactggtgtagaggccgctggtgaactacaggattatgttcaccaggacctgagaaagtttctccctgcattggccgaagaaatccaaattcacttggtcgaagctctgcccatcgttttgaatatgtttgagaaaaagctttcatcatacgcgcaatcacatttagaaaacacttcgatcaaagtacatctgagaacggctgtcgccaaagttgaagaaaagcaattgttggcaaagacgaaacacgaagacggtaaaataaccgaagaaactattccatacggtactttgatttgggccacgggtaacaaggcaagaccggtaatcacagaccttttcaagaaaattcctgagcaaaactcgtccaagagaggattggcagtgaatgactttttgcaagtgaaaggcagcaacaacattttcgccattggtgacaatgcatttgctgggttgccaccaaccgcccaagtggcgcaccaagaggccgaatatttggccaagaattttgataaaatggctcaaataccaaatttccaaaagaatctatcttcaagaaaggataaaattgatctcttgttcgaggagaacaactttaaacctttcaaatacaacgatttaggtgccttagcatacctgggatccgaaagggccattgcaaccatacgttccggtaagagaacattttacaccggtggtggcttaatgaccttctacttatggagaattatctacttgtccatgattctatctgcaagatcgagattaaaggtctttttcgactggattaaattagcatttttcaaaagagacttttttaaaggattatag

SEQ ID NO: 647 - DNA, 1542 bp, Artificial Sequence
  source: /note="Description of Artificial Sequence: Synthetic polynucleotide"
atgctatcgaagaatttgtatagtaacaagaggttgctcacctcgacgaatacgctagtcagattcgcttccaccagatccacaggggtggaaaactccggagcaggtcctacatcttttaagaccatgaaaatcattgaccctcagcacagcgacaaaccaaacgtgctgatactgggttcggggtggggagctatttcgtttttaaagcacattgacaccaagaagtacaacgtttccatcgtgtctcctagaagctatttcttatacacgcctttgttaccttctgcaccagttgggacagtagacgaaaagtcaattattgagcccatcgttaattttgctctcaagaaaaaggggaacgttacctactatgaggcagaagccacctctatcaatcccgacaggaataccgttaccataaaatcattatctgccgttagccagctataccaacctgaaaaccatctagggctgcatcaagcagaacctgctgaaattaagtacgattatttaatcagtgctgtaggtgcggaacctaacacatttggtattcctggggtcactgattacggtcatttcctgaaggaaattcccaactctttggaaataagaagaacttttgccgccaatctagagaaggctaacttattgccaaagggtgatcccgaaagaagaagactactgtccattgtcgtggttggtggtgggcctactggtgtagaggccgctggtgaactacaggattatgttcaccaggacctgagaaagtttctccctgcattggccgaagaaatccaaattcacttggtcgaagctctgcccatcgttttgaatatgtttgagaaaaagctttcatcatacgcgcaatcacatttagaaaacacttcgatcaaagtacatctgagaacggctgtcgccaaagttgaagaaaagcaattgttggcaaagacgaaacacgaagacggtaaaataaccgaagaaactattccatacggtactttgatttgggccacgggtaacaaggcaagaccggtaatcacagaccttttcaagaaaattcctgagcaaaactcgtccaagagaggattggcagtgaatgactttttgcaagtgaaaggcagcaacaacattttcgccattggtgacaatgcatttgctgggttgccaccaaccgcccaagtggcgcaccaagaggccgaatatttggccaagaattttgataaaatggctcaaataccaaatttccaaaagaatctatcttcaagaaaggataaaattgatctcttgttcgaggagaacaactttaaacctttcaaatacaacgatttaggtgccttagcatacctgggatccgaaagggccattgcaaccatacgttccggtaagagaacattttacaccggtggtggcttaatgaccttctacttatggagaattttgtacttgtccatgattctatctgcaagatcgagattaaaggtctttttcgactggattaaattagcatttttcaaaagagacttttttaaaggattatag

SEQ ID NO: 648 - DNA, 1542 bp, Artificial Sequence
  source: /note="Description of Artificial Sequence: Synthetic polynucleotide"
atgctatcgaagaatttgtatagtaacaagaggttgctcacctcgacgaatacgctagtcagattcgcttccaccagatccacaggggtggaaaactccggagcaggtcctacatcttttaagaccatgaaagtcattgaccctcagcacagcgacaaaccaaacgtgctgatactgggttcggggtggggagctatttcgtttttaaagcacattgacaccaagaagtacaacgtttccatcgtgtctcctagaagctatttcttatacacgcctttgttaccttctgcaccagttgggacagtagacgaaaagtcaattattgagcccatcgttaattttgctctcaagaaaaaggggaacgttacctactatgaggcagaagccacctctatcaatcccgacaggaataccgttaccataaaatcattatctgccgttagccagctataccaacctgaaaaccatctagggctgcatcaagcagaacctgctgaaattaagtacgattatttaatcagtgctgtaggtgcggaacctaacacatttggtattcctggggtcactgattacggtcatttcctgaaggaaattcccaactctttggaaataagaagaacttttgccgccaatctagagaaggctaacttattgccaaagggtgatcccgaaagaagaagactactgtccattgtcgtggttggtggtgggcctactggtgtagaggccgctggtgaactacaggattatgttcaccaggacctgagaaagtttctccctgcattggccgaagaagtccaaattcacttggtcgaagctctgcccatcgttttgaatatgtttgagaaaaagctttcatcatacgcgcaatcacatttagaaaacacttcgatcaaagtacatctgagaacggctgtcgccaaagttgaagaaaagcaattgttggcaaagacgaaacacgaagacggtaaaataaccgaagaaactattccatacggtactttgatttgggccacgggtaacaaggcaagaccggtaatcacagaccttttcaagaaaattcctgagcaaaactcgtccaagagaggattggcagtgaatgactttttgcaagtgaaaggcagcaacaacattttcgccattggtgacaatgcatttgctgggttgccaccaaccgcccaagtggcgcaccaagaggccgaatatttggccaagaattttgataaaatggctcaaataccaaatttccaaaagaatctatcttcaagaaaggataaaattgatctcttgttcgaggagaacaactttaaacctttcaaatacaacgatttaggtgccttagcatacctgggatccgaaagggccattgcaaccatacgttccggtaagagaacattttacaccggtggtggcttaatgaccttctacttatggagaattatctacatgtccatgattctatctgcaagatcgagattaaaggtctttttcgactggattaaattagcatttttcaaaagagacttttttaaaggattatag

SEQ ID NO: 649 - DNA, 1542 bp, Artificial Sequence
  source: /note="Description of Artificial Sequence: Synthetic polynucleotide"
atgctatcgaagaatttgtatagtaacaagaggttgctcacctcgacgaatacgctagtcagattcgcttccaccagatccacaggggtggaaaactccggagcaggtcctacatcttttaagaccatgaaaatcattgaccctcagcacagcgacaaaccaaacgtgctgatactgggttcggggtggggagctatttcgtttttaaagcacattgacaccaagaagtacaacgtttccatcgtgtctcctagaagctatttcttatacacgcctttgttaccttctgcaccagttgggacagtagacgaaaagtcaattattgagcccatcgttaattttgctctcaagaaaaaggggaacgttacctactatgaggcagaagccacctctatcaatcccgacaggaataccgttaccataaaatcattatctgccgttagccagctataccaacctgaaaaccatctagggctgcatcaagcagaacctgctgaaattaagtacgattatttaatcagtgctgtaggtgcggaacctaacacatttggtattcctggggtcactgattacggtcatttcctgaaggaaattcccaactctttggaaataagaagaacttttgccgccaatctagagaaggctaacttattgccaaagggtgatcccgaaagaagaagactactgtccattgtcgtggttggtggtgggcctactggtgtagaggccgctggtgaactacaggattatgttcaccaggacctgagaaagtttctccctgcattggccgaagaagtccaaattcacttggtcgaagctctgcccatcgttttgaatatgtttgagaaaaagctttcatcatacgcgcaatcacatttagaaaacacttcgatcaaagtacatctgagaacggctgtcgccaaagttgaagaaaagcaattgttggcaaagacgaaacacgaagacggtaaaataaccgaagaaactattccatacggtactttgatttgggccacgggtaacaaggcaagaccggtaatcacagaccttttcaagaaaattcctgagcaaaactcgtccaagagaggattggcagtgaatgactttttgcaagtgaaaggcagcaacaacattttcgccattggtgacaatgcatttgctgggttgccaccaaccgcccaagtggcgcaccaagaggccgaatatttggccaagaattttgataaaatggctcaaataccaaatttccaaaagaatctatcttcaagaaaggataaaattgatctcttgttcgaggagaacaactttaaacctttcaaatacaacgatttaggtgccttagcatacctgggatccgaaagggccattgcaaccatacgttccggtaagagaacattttacaccggtggtggcttaatgaccttctacttatggagaattttgtacatgtccatgattctatctgcaagatcgagattaaaggtctttttcgactggattaaattagcatttttcaaaagagacttttttaaaggattatag

SEQ ID NO: 650 - DNA, 1542 bp, Artificial Sequence
  source: /note="Description of Artificial Sequence: Synthetic polynucleotide"
atgctatcgaagaatttgtatagtaacaagaggttgctcacctcgacgaatacgctagtcagattcgcttccaccagatccacaggggtggaaaactccggagcaggtcctacatcttttaagaccatgaaaatcattgaccctcagcacagcgacaaaccaaacgtgctgatactgggttcggggtggggagctatttcgtttttaaagcacattgacaccaagaagtacaacgtttccatcgtgtctcctagaagctatttcttatacacgcctttgttaccttctgcaccagttgggacagtagacgaaaagtcaattattgagcccatcgttaattttgctctcaagaaaaaggggaacgttacctactatgaggcagaagccacctctatcaatcccgacaggaataccgttaccataaaatcattatctgccgttagccagctataccaacctgaaaaccatctagggctgcatcaagcagaacctgctgaaattaagtacgattatttaatcagtgctgtaggtgcggaacctaacacatttggtattcctggggtcactgattacggtcatttcctgaaggaaattcccaactctttggaaataagaagaacttttgccgccaatctagagaaggctaacttattgccaaagggtgatcccgaaagaagaagactactgtccattgtcgtggttggtggtgggcctactggtgtagaggccgctggtgaactacaggattatgttcaccaggacctgagaaagtttctccctgcattggccgaagaagtccaaattcacttggtcgaagctctgcccatcgttttgaatatgtttgagaaaaagctttcatcatacgcgcaatcacatttagaaaacacttcgatcaaagtacatctgagaacggctgtcgccaaagttgaagaaaagcaattgttggcaaagacgaaacacgaagacggtaaaataaccgaagaaactattccatacggtactttgatttgggccacgggtaacaaggcaagaccggtaatcacagaccttttcaagaaaattcctgagcaaaactcgtccaagagaggattggcagtgaatgactttttgcaagtgaaaggcagcaacaacattttcgccattggtgacaatgcatttgctgggttgccaccaaccgcccaagtggcgcaccaagaggccgaatatttggccaagaattttgataaaatggctcaaataccaaatttccaaaagaatctatcttcaagaaaggataaaattgatctcttgttcgaggagaacaactttaaacctttcaaatacaacgatttaggtgccttagcatacctgggatccgaaagggccattgcaaccatacgttccggtaagagaacattttacaccggtggtggcttaatgaccttctacttatggagaattatctacttgtccatgattctatctgcaagatcgagattaaaggtctttttcgactggattaaattagcatttttcaaaagagacttttttaaaggattatag

SEQ ID NO: 651 - DNA, 1542 bp, Artificial Sequence
  source: /note="Description of Artificial Sequence: Synthetic polynucleotide"
atgctatcgaagaatttgtatagtaacaagaggttgctcacctcgacgaatacgctagtcagattcgcttccaccagatccacaggggtggaaaactccggagcaggtcctacatcttttaagaccatgaaagtcattgaccctcagcacagcgacaaaccaaacgtgctgatactgggttcggggtggggagctatttcgtttttaaagcacattgacaccaagaagtacaacgtttccatcgtgtctcctagaagctatttcatctttacgcctttgttaccttctgcaccagttgggacagtagacgaaaagtcaattattgagcccatcgttaattttgctctcaagaaaaaggggaacgttacctactatgaggcagaagccacctctatcaatcccgacaggaataccgttaccataaaatcattatctgccgttagccagctataccaacctgaaaaccatctagggctgcatcaagcagaacctgctgaaattaagtacgattatttaatcagtgctgtaggtgcggaacctaacacatttggtattcctggggtcactgattacggtcatttcctgaaggaaattcccaactctttggaaataagaagaacttttgccgccaatctagagaaggctaacttattgccaaagggtgatcccgaaagaagaagactactgtccattgtcgtggttggtggtgggcctactggtgtagaggccgctggtgaactacaggattatgttcaccaggacctgagaaagtttctccctgcattggccgaagaaatccaaattcacttggtcgaagctctgcccatcgttttgaatatgtttgagaaaaagctttcatcatacgcgcaatcacatttagaaaacacttcgatcaaagtacatctgagaacggctgtcgccaaagttgaagaaaagcaattgttggcaaagacgaaacacgaagacggtaaaataaccgaagaaactattccatacggtactttgatttgggccacgggtaacaaggcaagaccggtaatcacagaccttttcaagaaaattcctgagcaaaactcgtccaagagaggattggcagtgaatgactttttgcaagtgaaaggcagcaacaacattttcgccattggtgacaatgcatttgctgggttgccaccaaccgcccaagtggcgcaccaagaggccgaatatttggccaagaattttgataaaatggctcaaataccaaatttccaaaagaatctatcttcaagaaaggataaaattgatctcttgttcgaggagaacaactttaaacctttcaaatacaacgatttaggtgccttagcatacctgggatccgaaagggccattgcaaccatacgttccggtaagagaacattttacaccggtggtggcttaatgaccttctacttatggagaattttgtacatgtccatgattctatctgcaagatcgagattaaaggtctttttcgactggattaaattagcatttttcaaaagagacttttttaaaggattatag

SEQ ID NO: 652 - DNA, 1542 bp, Artificial Sequence
  source: /note="Description of Artificial Sequence: Synthetic polynucleotide"
atgctatcgaagaatttgtatagtaacaagaggttgctcacctcgacgaatacgctagtcagattcgcttccaccagatccacaggggtggaaaactccggagcaggtcctacatcttttaagaccatgaaagtcattgaccctcagcacagcgacaaaccaaacgtgctgatactgggttcggggtggggagctatttcgtttttaaagcacattgacaccaagaagtacaacgtttccatcgtgtctcctagaagctatttcatctttacgcctttgttaccttctgcaccagttgggacagtagacgaaaagtcaattattgagcccatcgttaattttgctctcaagaaaaaggggaacgttacctactatgaggcagaagccacctctatcaatcccgacaggaataccgttaccataaaatcattatctgccgttagccagctataccaacctgaaaaccatctagggctgcatcaagcagaacctgctgaaattaagtacgattatttaatcagtgctgtaggtgcggaacctaacacatttggtattcctggggtcactgattacggtcatttcctgaaggaaattcccaactctttggaaataagaagaacttttgccgccaatctagagaaggctaacttattgccaaagggtgatcccgaaagaagaagactactgtccattgtcgtggttggtggtgggcctactggtgtagaggccgctggtgaactacaggattatgttcaccaggacctgagaaagtttctccctgcattggccgaagaaatccaaattcacttggtcgaagctctgcccatcgttttgaatatgtttgagaaaaagctttcatcatacgcgcaatcacatttagaaaacacttcgatcaaagtacatctgagaacggctgtcgccaaagttgaagaaaagcaattgttggcaaagacgaaacacgaagacggtaaaataaccgaagaaactattccatacggtactttgatttgggccacgggtaacaaggcaagaccggtaatcacagaccttttcaagaaaattcctgagcaaaactcgtccaagagaggattggcagtgaatgactttttgcaagtgaaaggcagcaacaacattttcgccattggtgacaatgcatttgctgggttgccaccaaccgcccaagtggcgcaccaagaggccgaatatttggccaagaattttgataaaatggctcaaataccaaatttccaaaagaatctatcttcaagaaaggataaaattgatctcttgttcgaggagaacaactttaaacctttcaaatacaacgatttaggtgccttagcatacctgggatccgaaagggccattgcaaccatacgttccggtaagagaacattttacaccggtggtggcttaatgaccttctacttatggagaattatctacttgtccatgattctatctgcaagatcgagattaaaggtctttttcgactggattaaattagcatttttcaaaagagacttttttaaaggattatag

SEQ ID NO: 653 - DNA, 1542 bp, Artificial Sequence
  source: /note="Description of Artificial Sequence: Synthetic polynucleotide"
atgctatcgaagaatttgtatagtaacaagaggttgctcacctcgacgaatacgctagtcagattcgcttccaccagatccacaggggtggaaaactccggagcaggtcctacatcttttaagaccatgaaaatcattgaccctcagcacagcgacaaaccaaacgtgctgatactgggttcggggtggggagctatttcgtttttaaagcacattgacaccaagaagtacaacgtttccatcgtgtctcctagaagctatttcatctttacgcctttgttaccttctgcaccagttgggacagtagacgaaaagtcaattattgagcccatcgttaattttgctctcaagaaaaaggggaacgttacctactatgaggcagaagccacctctatcaatcccgacaggaataccgttaccataaaatcattatctgccgttagccagctataccaacctgaaaaccatctagggctgcatcaagcagaacctgctgaaattaagtacgattatttaatcagtgctgtaggtgcggaacctaacacatttggtattcctggggtcactgattacggtcatttcctgaaggaaattcccaactctttggaaataagaagaacttttgccgccaatctagagaaggctaacttattgccaaagggtgatcccgaaagaagaagactactgtccattgtcgtggttggtggtgggcctactggtgtagaggccgctggtgaactacaggattatgttcaccaggacctgagaaagtttctccctgcattggccgaagaaatccaaattcacttggtcgaagctctgcccatcgttttgaatatgtttgagaaaaagctttcatcatacgcgcaatcacatttagaaaacacttcgatcaaagtacatctgagaacggctgtcgccaaagttgaagaaaagcaattgttggcaaagacgaaacacgaagacggtaaaataaccgaagaaactattccatacggtactttgatttgggccacgggtaacaaggcaagaccggtaatcacagaccttttcaagaaaattcctgagcaaaactcgtccaagagaggattggcagtgaatgactttttgcaagtgaaaggcagcaacaacattttcgccattggtgacaatgcatttgctgggttgccaccaaccgcccaagtggcgcaccaagaggccgaatatttggccaagaattttgataaaatggctcaaataccaaatttccaaaagaatctatcttcaagaaaggataaaattgatctcttgttcgaggagaacaactttaaacctttcaaatacaacgatttaggtgccttagcatacctgggatccgaaagggccattgcaaccatacgttccggtaagagaacattttacaccggtggtggcttaatgaccttctacttatggagaattttgtacttgtccatgattctatctgcaagatcgagattaaaggtctttttcgactggattaaattagcatttttcaaaagagacttttttaaaggattatag

SEQ ID NO: 654 - DNA, 1542 bp, Artificial Sequence
  source: /note="Description of Artificial Sequence: Synthetic polynucleotide"
atgctatcgaagaatttgtatagtaacaagaggttgctcacctcgacgaatacgctagtcagattcgcttccaccagatccacaggggtggaaaactccggagcaggtcctacatcttttaagaccatgaaagtcattgaccctcagcacagcgacaaaccaaacgtgctgatactgggttcggggtggggagctatttcgtttttaaagcacattgacaccaagaagtacaacgtttccatcgtgtctcctagaagctatttcatctttacgcctttgttaccttctgcaccagttgggacagtagacgaaaagtcaattattgagcccatcgttaattttgctctcaagaaaaaggggaacgttacctactatgaggcagaagccacctctatcaatcccgacaggaataccgttaccataaaatcattatctgccgttagccagctataccaacctgaaaaccatctagggctgcatcaagcagaacctgctgaaattaagtacgattatttaatcagtgctgtaggtgcggaacctaacacatttggtattcctggggtcactgattacggtcatttcctgaaggaaattcccaactctttggaaataagaagaacttttgccgccaatctagagaaggctaacttattgccaaagggtgatcccgaaagaagaagactactgtccattgtcgtggttggtggtgggcctactggtgtagaggccgctggtgaactacaggattatgttcaccaggacctgagaaagtttctccctgcattggccgaagaagtccaaattcacttggtcgaagctctgcccatcgttttgaatatgtttgagaaaaagctttcatcatacgcgcaatcacatttagaaaacacttcgatcaaagtacatctgagaacggctgtcgccaaagttgaagaaaagcaattgttggcaaagacgaaacacgaagacggtaaaataaccgaagaaactattccatacggtactttgatttgggccacgggtaacaaggcaagaccggtaatcacagaccttttcaagaaaattcctgagcaaaactcgtccaagagaggattggcagtgaatgactttttgcaagtgaaaggcagcaacaacattttcgccattggtgacaatgcatttgctgggttgccaccaaccgcccaagtggcgcaccaagaggccgaatatttggccaagaattttgataaaatggctcaaataccaaatttccaaaagaatctatcttcaagaaaggataaaattgatctcttgttcgaggagaacaactttaaacctttcaaatacaacgatttaggtgccttagcatacctgggatccgaaagggccattgcaaccatacgttccggtaagagaacattttacaccggtggtggcttaatgaccttctacttatggagaattatctacatgtccatgattctatctgcaagatcgagattaaaggtctttttcgactggattaaattagcatttttcaaaagagacttttttaaaggattatag

SEQ ID NO: 655 - DNA, 1542 bp, Artificial Sequence
  source: /note="Description of Artificial Sequence: Synthetic polynucleotide"
atgctatcgaagaatttgtatagtaacaagaggttgctcacctcgacgaatacgctagtcagattcgcttccaccagatccacaggggtggaaaactccggagcaggtcctacatcttttaagaccatgaaaatcattgaccctcagcacagcgacaaaccaaacgtgctgatactgggttcggggtggggagctatttcgtttttaaagcacattgacaccaagaagtacaacgtttccatcgtgtctcctagaagctatttcatctttacgcctttgttaccttctgcaccagttgggacagtagacgaaaagtcaattattgagcccatcgttaattttgctctcaagaaaaaggggaacgttacctactatgaggcagaagccacctctatcaatcccgacaggaataccgttaccataaaatcattatctgccgttagccagctataccaacctgaaaaccatctagggctgcatcaagcagaacctgctgaaattaagtacgattatttaatcagtgctgtaggtgcggaacctaacacatttggtattcctggggtcactgattacggtcatttcctgaaggaaattcccaactctttggaaataagaagaacttttgccgccaatctagagaaggctaacttattgccaaagggtgatcccgaaagaagaagactactgtccattgtcgtggttggtggtgggcctactggtgtagaggccgctggtgaactacaggattatgttcaccaggacctgagaaagtttctccctgcattggccgaagaagtccaaattcacttggtcgaagctctgcccatcgttttgaatatgtttgagaaaaagctttcatcatacgcgcaatcacatttagaaaacacttcgatcaaagtacatctgagaacggctgtcgccaaagttgaagaaaagcaattgttggcaaagacgaaacacgaagacggtaaaataaccgaagaaactattccatacggtactttgatttgggccacgggtaacaaggcaagaccggtaatcacagaccttttcaagaaaattcctgagcaaaactcgtccaagagaggattggcagtgaatgactttttgcaagtgaaaggcagcaacaacattttcgccattggtgacaatgcatttgctgggttgccaccaaccgcccaagtggcgcaccaagaggccgaatatttggccaagaattttgataaaatggctcaaataccaaatttccaaaagaatctatcttcaagaaaggataaaattgatctcttgttcgaggagaacaactttaaacctttcaaatacaacgatttaggtgccttagcatacctgggatccgaaagggccattgcaaccatacgttccggtaagagaacattttacaccggtggtggcttaatgaccttctacttatggagaattttgtacatgtccatgattctatctgcaagatcgagattaaaggtctttttcgactggattaaattagcatttttcaaaagagacttttttaaaggattatag

SEQ ID NO: 656 - DNA, 1542 bp, Artificial Sequence
  source: /note="Description of Artificial Sequence: Synthetic polynucleotide"
atgctatcgaagaatttgtatagtaacaagaggttgctcacctcgacgaatacgctagtcagattcgcttccaccagatccacaggggtggaaaactccggagcaggtcctacatcttttaagaccatgaaaatcattgaccctcagcacagcgacaaaccaaacgtgctgatactgggttcggggtggggagctatttcgtttttaaagcacattgacaccaagaagtacaacgtttccatcgtgtctcctagaagctatttcatctttacgcctttgttaccttctgcaccagttgggacagtagacgaaaagtcaattattgagcccatcgttaattttgctctcaagaaaaaggggaacgttacctactatgaggcagaagccacctctatcaatcccgacaggaataccgttaccataaaatcattatctgccgttagccagctataccaacctgaaaaccatctagggctgcatcaagcagaacctgctgaaattaagtacgattatttaatcagtgctgtaggtgcggaacctaacacatttggtattcctggggtcactgattacggtcatttcctgaaggaaattcccaactctttggaaataagaagaacttttgccgccaatctagagaaggctaacttattgccaaagggtgatcccgaaagaagaagactactgtccattgtcgtggttggtggtgggcctactggtgtagaggccgctggtgaactacaggattatgttcaccaggacctgagaaagtttctccctgcattggccgaagaagtccaaattcacttggtcgaagctctgcccatcgttttgaatatgtttgagaaaaagctttcatcatacgcgcaatcacatttagaaaacacttcgatcaaagtacatctgagaacggctgtcgccaaagttgaagaaaagcaattgttggcaaagacgaaacacgaagacggtaaaataaccgaagaaactattccatacggtactttgatttgggccacgggtaacaaggcaagaccggtaatcacagaccttttcaagaaaattcctgagcaaaactcgtccaagagaggattggcagtgaatgactttttgcaagtgaaaggcagcaacaacattttcgccattggtgacaatgcatttgctgggttgccaccaaccgcccaagtggcgcaccaagaggccgaatatttggccaagaattttgataaaatggctcaaataccaaatttccaaaagaatctatcttcaagaaaggataaaattgatctcttgttcgaggagaacaactttaaacctttcaaatacaacgatttaggtgccttagcatacctgggatccgaaagggccattgcaaccatacgttccggtaagagaacattttacaccggtggtggcttaatgaccttctacttatggagaattatctacttgtccatgattctatctgcaagatcgagattaaaggtctttttcgactggattaaattagcatttttcaaaagagacttttttaaaggattatag

SEQ ID NO: 657 - DNA, 1542 bp, Artificial Sequence
  source: /note="Description of Artificial Sequence: Synthetic polynucleotide"
atgctatcgaagaatttgtatagtaacaagaggttgctcacctcgacgaatacgctagtcagattcgcttccaccagatccacaggggtggaaaactccggagcaggtcctacatcttttaagaccatgaaagtcattgaccctcagcacagcgacaaaccaaacgtgctgatactgggttcggggtggggagctatttcgtttttaaagcacattgacaccaagaagtacaacgtttccatcgtgtctcctagaagctatttcttatttacgcctttgttaccttctgcaccagttgggacagtagacgaaaagtcaattattgagcccatcgttaattttgctctcaagaaaaaggggaacgttacctactatgaggcagaagccacctctatcaatcccgacaggaataccgttaccataaaatcattatctgccgttagccagctataccaacctgaaaaccatctagggctgcatcaagcagaacctgctgaaattaagtacgattatttaatcagtgctgtaggtgcggaacctaacacatttggtattcctggggtcactgattacggtcatttcctgaaggaaattcccaactctttggaaataagaagaacttttgccgccaatctagagaaggctaacttattgccaaagggtgatcccgaaagaagaagactactgtccattgtcgtggttggtggtgggcctactggtgtagaggccgctggtgaactacaggattatgttcaccaggacctgagaaagtttctccctgcattggccgaagaaatccaaattcacttggtcgaagctctgcccatcgttttgaatatgtttgagaaaaagctttcatcatacgcgcaatcacatttagaaaacacttcgatcaaagtacatctgagaacggctgtcgccaaagttgaagaaaagcaattgttggcaaagacgaaacacgaagacggtaaaataaccgaagaaactattccatacggtactttgatttgggccacgggtaacaaggcaagaccggtaatcacagaccttttcaagaaaattcctgagcaaaactcgtccaagagaggattggcagtgaatgactttttgcaagtgaaaggcagcaacaacattttcgccattggtgacaatgcatttgctgggttgccaccaaccgcccaagtggcgcaccaagaggccgaatatttggccaagaattttgataaaatggctcaaataccaaatttccaaaagaatctatcttcaagaaaggataaaattgatctcttgttcgaggagaacaactttaaacctttcaaatacaacgatttaggtgccttagcatacctgggatccgaaagggccattgcaaccatacgttccggtaagagaacattttacaccggtggtggcttaatgaccttctacttatggagaattatctacatgtccatgattctatctgcaagatcgagattaaaggtctttttcgactggattaaattagcatttttcaaaagagacttttttaaaggattatag

SEQ ID NO: 658 - DNA, 1542 bp, Artificial Sequence
  source: /note="Description of Artificial Sequence: Synthetic polynucleotide"
atgctatcgaagaatttgtatagtaacaagaggttgctcacctcgacgaatacgctagtcagattcgcttccaccagatccacaggggtggaaaactccggagcaggtcctacatcttttaagaccatgaaaatcattgaccctcagcacagcgacaaaccaaacgtgctgatactgggttcggggtggggagctatttcgtttttaaagcacattgacaccaagaagtacaacgtttccatcgtgtctcctagaagctatttcttatttacgcctttgttaccttctgcaccagttgggacagtagacgaaaagtcaattattgagcccatcgttaattttgctctcaagaaaaaggggaacgttacctactatgaggcagaagccacctctatcaatcccgacaggaataccgttaccataaaatcattatctgccgttagccagctataccaacctgaaaaccatctagggctgcatcaagcagaacctgctgaaattaagtacgattatttaatcagtgctgtaggtgcggaacctaacacatttggtattcctggggtcactgattacggtcatttcctgaaggaaattcccaactctttggaaataagaagaacttttgccgccaatctagagaaggctaacttattgccaaagggtgatcccgaaagaagaagactactgtccattgtcgtggttggtggtgggcctactggtgtagaggccgctggtgaactacaggattatgttcaccaggacctgagaaagtttctccctgcattggccgaagaaatccaaattcacttggtcgaagctctgcccatcgttttgaatatgtttgagaaaaagctttcatcatacgcgcaatcacatttagaaaacacttcgatcaaagtacatctgagaacggctgtcgccaaagttgaagaaaagcaattgttggcaaagacgaaacacgaagacggtaaaataaccgaagaaactattccatacggtactttgatttgggccacgggtaacaaggcaagaccggtaatcacagaccttttcaagaaaattcctgagcaaaactcgtccaagagaggattggcagtgaatgactttttgcaagtgaaaggcagcaacaacattttcgccattggtgacaatgcatttgctgggttgccaccaaccgcccaagtggcgcaccaagaggccgaatatttggccaagaattttgataaaatggctcaaataccaaatttccaaaagaatctatcttcaagaaaggataaaattgatctcttgttcgaggagaacaactttaaacctttcaaatacaacgatttaggtgccttagcatacctgggatccgaaagggccattgcaaccatacgttccggtaagagaacattttacaccggtggtggcttaatgaccttctacttatggagaattttgtacatgtccatgattctatctgcaagatcgagattaaaggtctttttcgactggattaaattagcatttttcaaaagagacttttttaaaggattatag

SEQ ID NO: 659 - DNA, 1542 bp, Artificial Sequence
  source: /note="Description of Artificial Sequence: Synthetic polynucleotide"
atgctatcgaagaatttgtatagtaacaagaggttgctcacctcgacgaatacgctagtcagattcgcttccaccagatccacaggggtggaaaactccggagcaggtcctacatcttttaagaccatgaaaatcattgaccctcagcacagcgacaaaccaaacgtgctgatactgggttcggggtggggagctatttcgtttttaaagcacattgacaccaagaagtacaacgtttccatcgtgtctcctagaagctatttcttatttacgcctttgttaccttctgcaccagttgggacagtagacgaaaagtcaattattgagcccatcgttaattttgctctcaagaaaaaggggaacgttacctactatgaggcagaagccacctctatcaatcccgacaggaataccgttaccataaaatcattatctgccgttagccagctataccaacctgaaaaccatctagggctgcatcaagcagaacctgctgaaattaagtacgattatttaatcagtgctgtaggtgcggaacctaacacatttggtattcctggggtcactgattacggtcatttcctgaaggaaattcccaactctttggaaataagaagaacttttgccgccaatctagagaaggctaacttattgccaaagggtgatcccgaaagaagaagactactgtccattgtcgtggttggtggtgggcctactggtgtagaggccgctggtgaactacaggattatgttcaccaggacctgagaaagtttctccctgcattggccgaagaaatccaaattcacttggtcgaagctctgcccatcgttttgaatatgtttgagaaaaagctttcatcatacgcgcaatcacatttagaaaacacttcgatcaaagtacatctgagaacggctgtcgccaaagttgaagaaaagcaattgttggcaaagacgaaacacgaagacggtaaaataaccgaagaaactattccatacggtactttgatttgggccacgggtaacaaggcaagaccggtaatcacagaccttttcaagaaaattcctgagcaaaactcgtccaagagaggattggcagtgaatgactttttgcaagtgaaaggcagcaacaacattttcgccattggtgacaatgcatttgctgggttgccaccaaccgcccaagtggcgcaccaagaggccgaatatttggccaagaattttgataaaatggctcaaataccaaatttccaaaagaatctatcttcaagaaaggataaaattgatctcttgttcgaggagaacaactttaaacctttcaaatacaacgatttaggtgccttagcatacctgggatccgaaagggccattgcaaccatacgttccggtaagagaacattttacaccggtggtggcttaatgaccttctacttatggagaattatctacttgtccatgattctatctgcaagatcgagattaaaggtctttttcgactggattaaattagcatttttcaaaagagacttttttaaaggattatag

SEQ ID NO: 660 - DNA, 1542 bp, Artificial Sequence
  source: /note="Description of Artificial Sequence: Synthetic polynucleotide"
atgctatcgaagaatttgtatagtaacaagaggttgctcacctcgacgaatacgctagtcagattcgcttccaccagatccacaggggtggaaaactccggagcaggtcctacatcttttaagaccatgaaaatcattgaccctcagcacagcgacaaaccaaacgtgctgatactgggttcggggtggggagctatttcgtttttaaagcacattgacaccaagaagtacaacgtttccatcgtgtctcctagaagctatttcttatttacgcctttgttaccttctgcaccagttgggacagtagacgaaaagtcaattattgagcccatcgttaattttgctctcaagaaaaaggggaacgttacctactatgaggcagaagccacctctatcaatcccgacaggaataccgttaccataaaatcattatctgccgttagccagctataccaacctgaaaaccatctagggctgcatcaagcagaacctgctgaaattaagtacgattatttaatcagtgctgtaggtgcggaacctaacacatttggtattcctggggtcactgattacggtcatttcctgaaggaaattcccaactctttggaaataagaagaacttttgccgccaatctagagaaggctaacttattgccaaagggtgatcccgaaagaagaagactactgtccattgtcgtggttggtggtgggcctactggtgtagaggccgctggtgaactacaggattatgttcaccaggacctgagaaagtttctccctgcattggccgaagaagtccaaattcacttggtcgaagctctgcccatcgttttgaatatgtttgagaaaaagctttcatcatacgcgcaatcacatttagaaaacacttcgatcaaagtacatctgagaacggctgtcgccaaagttgaagaaaagcaattgttggcaaagacgaaacacgaagacggtaaaataaccgaagaaactattccatacggtactttgatttgggccacgggtaacaaggcaagaccggtaatcacagaccttttcaagaaaattcctgagcaaaactcgtccaagagaggattggcagtgaatgactttttgcaagtgaaaggcagcaacaacattttcgccattggtgacaatgcatttgctgggttgccaccaaccgcccaagtggcgcaccaagaggccgaatatttggccaagaattttgataaaatggctcaaataccaaatttccaaaagaatctatcttcaagaaaggataaaattgatctcttgttcgaggagaacaactttaaacctttcaaatacaacgatttaggtgccttagcatacctgggatccgaaagggccattgcaaccatacgttccggtaagagaacattttacaccggtggtggcttaatgaccttctacttatggagaattatctacatgtccatgattctatctgcaagatcgagattaaaggtctttttcgactggattaaattagcatttttcaaaagagacttttttaaaggattatag

SEQ ID NO: 661 - DNA, 1542 bp, Artificial Sequence
  source: /note="Description of Artificial Sequence: Synthetic polynucleotide"
atgctatcgaagaatttgtatagtaacaagaggttgctcacctcgacgaatacgctagtcagattcgcttccaccagatccacaggggtggaaaactccggagcaggtcctacatcttttaagaccatgaaagtcattgaccctcagcacagcgacaaaccaaacgtgctgatactgggttcggggtggggagctatttcgtttttaaagcacattgacaccaagaagtacaacgtttccatcatctctcctagaagctatttcatctacacgcctttgttaccttctgcaccagttgggacagtagacgaaaagtcaattattgagcccatcgttaattttgctctcaagaaaaaggggaacgttacctactatgaggcagaagccacctctatcaatcccgacaggaataccgttaccataaaatcattatctgccgttagccagctataccaacctgaaaaccatctagggctgcatcaagcagaacctgctgaaattaagtacgattatttaatcagtgctgtaggtgcggaacctaacacatttggtattcctggggtcactgattacggtcatttcctgaaggaaattcccaactctttggaaataagaagaacttttgccgccaatctagagaaggctaacttattgccaaagggtgatcccgaaagaagaagactactgtccattgtcgtggttggtggtgggcctactggtgtagaggccgctggtgaactacaggattatgttcaccaggacctgagaaagtttctccctgcattggccgaagaaatccaaattcacttggtcgaagctctgcccatcgttttgaatatgtttgagaaaaagctttcatcatacgcgcaatcacatttagaaaacacttcgatcaaagtacatctgagaacggctgtcgccaaagttgaagaaaagcaattgttggcaaagacgaaacacgaagacggtaaaataaccgaagaaactattccatacggtactttgatttgggccacgggtaacaaggcaagaccggtaatcacagaccttttcaagaaaattcctgagcaaaactcgtccaagagaggattggcagtgaatgactttttgcaagtgaaaggcagcaacaacattttcgccattggtgacaatgcatttgctgggttgccaccaaccgcccaagtggcgcaccaagaggccgaatatttggccaagaattttgataaaatggctcaaataccaaatttccaaaagaatctatcttcaagaaaggataaaattgatctcttgttcgaggagaacaactttaaacctttcaaatacaacgatttaggtgccttagcatacctgggatccgaaagggccattgcaaccatacgttccggtaagagaacattttacaccggtggtggcttaatgaccttctacttatggagaattttgtacatgtccatgattctatctgcaagatcgagattaaaggtctttttcgactggattaaattagcatttttcaaaagagacttttttaaaggattatag

SEQ ID NO: 662 - DNA, 1542 bp, Artificial Sequence
  source: /note="Description of Artificial Sequence: Synthetic polynucleotide"
atgctatcgaagaatttgtatagtaacaagaggttgctcacctcgacgaatacgctagtcagattcgcttccaccagatccacaggggtggaaaactccggagcaggtcctacatcttttaagaccatgaaagtcattgaccctcagcacagcgacaaaccaaacgtgctgatactgggttcggggtggggagctatttcgtttttaaagcacattgacaccaagaagtacaacgtttccatcatctctcctagaagctatttcatctacacgcctttgttaccttctgcaccagttgggacagtagacgaaaagtcaattattgagcccatcgttaattttgctctcaagaaaaaggggaacgttacctactatgaggcagaagccacctctatcaatcccgacaggaataccgttaccataaaatcattatctgccgttagccagctataccaacctgaaaaccatctagggctgcatcaagcagaacctgctgaaattaagtacgattatttaatcagtgctgtaggtgcggaacctaacacatttggtattcctggggtcactgattacggtcatttcctgaaggaaattcccaactctttggaaataagaagaacttttgccgccaatctagagaaggctaacttattgccaaagggtgatcccgaaagaagaagactactgtccattgtcgtggttggtggtgggcctactggtgtagaggccgctggtgaactacaggattatgttcaccaggacctgagaaagtttctccctgcattggccgaagaaatccaaattcacttggtcgaagctctgcccatcgttttgaatatgtttgagaaaaagctttcatcatacgcgcaatcacatttagaaaacacttcgatcaaagtacatctgagaacggctgtcgccaaagttgaagaaaagcaattgttggcaaagacgaaacacgaagacggtaaaataaccgaagaaactattccatacggtactttgatttgggccacgggtaacaaggcaagaccggtaatcacagaccttttcaagaaaattcctgagcaaaactcgtccaagagaggattggcagtgaatgactttttgcaagtgaaaggcagcaacaacattttcgccattggtgacaatgcatttgctgggttgccaccaaccgcccaagtggcgcaccaagaggccgaatatttggccaagaattttgataaaatggctcaaataccaaatttccaaaagaatctatcttcaagaaaggataaaattgatctcttgttcgaggagaacaactttaaacctttcaaatacaacgatttaggtgccttagcatacctgggatccgaaagggccattgcaaccatacgttccggtaagagaacattttacaccggtggtggcttaatgaccttctacttatggagaattatctacttgtccatgattctatctgcaagatcgagattaaaggtctttttcgactggattaaattagcatttttcaaaagagacttttttaaaggattatag

SEQ ID NO: 663 - DNA, 1542 bp, Artificial Sequence
  source: /note="Description of Artificial Sequence: Synthetic polynucleotide"
atgctatcgaagaatttgtatagtaacaagaggttgctcacctcgacgaatacgctagtcagattcgcttccaccagatccacaggggtggaaaactccggagcaggtcctacatcttttaagaccatgaaaatcattgaccctcagcacagcgacaaaccaaacgtgctgatactgggttcggggtggggagctatttcgtttttaaagcacattgacaccaagaagtacaacgtttccatcatctctcctagaagctatttcatctacacgcctttgttaccttctgcaccagttgggacagtagacgaaaagtcaattattgagcccatcgttaattttgctctcaagaaaaaggggaacgttacctactatgaggcagaagccacctctatcaatcccgacaggaataccgttaccataaaatcattatctgccgttagccagctataccaacctgaaaaccatctagggctgcatcaagcagaacctgctgaaattaagtacgattatttaatcagtgctgtaggtgcggaacctaacacatttggtattcctggggtcactgattacggtcatttcctgaaggaaattcccaactctttggaaataagaagaacttttgccgccaatctagagaaggctaacttattgccaaagggtgatcccgaaagaagaagactactgtccattgtcgtggttggtggtgggcctactggtgtagaggccgctggtgaactacaggattatgttcaccaggacctgagaaagtttctccctgcattggccgaagaaatccaaattcacttggtcgaagctctgcccatcgttttgaatatgtttgagaaaaagctttcatcatacgcgcaatcacatttagaaaacacttcgatcaaagtacatctgagaacggctgtcgccaaagttgaagaaaagcaattgttggcaaagacgaaacacgaagacggtaaaataaccgaagaaactattccatacggtactttgatttgggccacgggtaacaaggcaagaccggtaatcacagaccttttcaagaaaattcctgagcaaaactcgtccaagagaggattggcagtgaatgactttttgcaagtgaaaggcagcaacaacattttcgccattggtgacaatgcatttgctgggttgccaccaaccgcccaagtggcgcaccaagaggccgaatatttggccaagaattttgataaaatggctcaaataccaaatttccaaaagaatctatcttcaagaaaggataaaattgatctcttgttcgaggagaacaactttaaacctttcaaatacaacgatttaggtgccttagcatacctgggatccgaaagggccattgcaaccatacgttccggtaagagaacattttacaccggtggtggcttaatgaccttctacttatggagaattttgtacttgtccatgattctatctgcaagatcgagattaaaggtctttttcgactggattaaattagcatttttcaaaagagacttttttaaaggattatag

SEQ ID NO: 664 - DNA, 1542 bp, Artificial Sequence
  source: /note="Description of Artificial Sequence: Synthetic polynucleotide"
atgctatcgaagaatttgtatagtaacaagaggttgctcacctcgacgaatacgctagtcagattcgcttccaccagatccacaggggtggaaaactccggagcaggtcctacatcttttaagaccatgaaagtcattgaccctcagcacagcgacaaaccaaacgtgctgatactgggttcggggtggggagctatttcgtttttaaagcacattgacaccaagaagtacaacgtttccatcatctctcctagaagctatttcatctacacgcctttgttaccttctgcaccagttgggacagtagacgaaaagtcaattattgagcccatcgttaattttgctctcaagaaaaaggggaacgttacctactatgaggcagaagccacctctatcaatcccgacaggaataccgttaccataaaatcattatctgccgttagccagctataccaacctgaaaaccatctagggctgcatcaagcagaacctgctgaaattaagtacgattatttaatcagtgctgtaggtgcggaacctaacacatttggtattcctggggtcactgattacggtcatttcctgaaggaaattcccaactctttggaaataagaagaacttttgccgccaatctagagaaggctaacttattgccaaagggtgatcccgaaagaagaagactactgtccattgtcgtggttggtggtgggcctactggtgtagaggccgctggtgaactacaggattatgttcaccaggacctgagaaagtttctccctgcattggccgaagaagtccaaattcacttggtcgaagctctgcccatcgttttgaatatgtttgagaaaaagctttcatcatacgcgcaatcacatttagaaaacacttcgatcaaagtacatctgagaacggctgtcgccaaagttgaagaaaagcaattgttggcaaagacgaaacacgaagacggtaaaataaccgaagaaactattccatacggtactttgatttgggccacgggtaacaaggcaagaccggtaatcacagaccttttcaagaaaattcctgagcaaaactcgtccaagagaggattggcagtgaatgactttttgcaagtgaaaggcagcaacaacattttcgccattggtgacaatgcatttgctgggttgccaccaaccgcccaagtggcgcaccaagaggccgaatatttggccaagaattttgataaaatggctcaaataccaaatttccaaaagaatctatcttcaagaaaggataaaattgatctcttgttcgaggagaacaactttaaacctttcaaatacaacgatttaggtgccttagcatacctgggatccgaaagggccattgcaaccatacgttccggtaagagaacattttacaccggtggtggcttaatgaccttctacttatggagaattatctacatgtccatgattctatctgcaagatcgagattaaaggtctttttcgactggattaaattagcatttttcaaaagagacttttttaaaggattatag

SEQ ID NO: 665 - DNA, 1542 bp, Artificial Sequence
  source: /note="Description of Artificial Sequence: Synthetic polynucleotide"
atgctatcgaagaatttgtatagtaacaagaggttgctcacctcgacgaatacgctagtcagattcgcttccaccagatccacaggggtggaaaactccggagcaggtcctacatcttttaagaccatgaaaatcattgaccctcagcacagcgacaaaccaaacgtgctgatactgggttcggggtggggagctatttcgtttttaaagcacattgacaccaagaagtacaacgtttccatcatctctcctagaagctatttcatctacacgcctttgttaccttctgcaccagttgggacagtagacgaaaagtcaattattgagcccatcgttaattttgctctcaagaaaaaggggaacgttacctactatgaggcagaagccacctctatcaatcccgacaggaataccgttaccataaaatcattatctgccgttagccagctataccaacctgaaaaccatctagggctgcatcaagcagaacctgctgaaattaagtacgattatttaatcagtgctgtaggtgcggaacctaacacatttggtattcctggggtcactgattacggtcatttcctgaaggaaattcccaactctttggaaataagaagaacttttgccgccaatctagagaaggctaacttattgccaaagggtgatcccgaaagaagaagactactgtccattgtcgtggttggtggtgggcctactggtgtagaggccgctggtgaactacaggattatgttcaccaggacctgagaaagtttctccctgcattggccgaagaagtccaaattcacttggtcgaagctctgcccatcgttttgaatatgtttgagaaaaagctttcatcatacgcgcaatcacatttagaaaacacttcgatcaaagtacatctgagaacggctgtcgccaaagttgaagaaaagcaattgttggcaaagacgaaacacgaagacggtaaaataaccgaagaaactattccatacggtactttgatttgggccacgggtaacaaggcaagaccggtaatcacagaccttttcaagaaaattcctgagcaaaactcgtccaagagaggattggcagtgaatgactttttgcaagtgaaaggcagcaacaacattttcgccattggtgacaatgcatttgctgggttgccaccaaccgcccaagtggcgcaccaagaggccgaatatttggccaagaattttgataaaatggctcaaataccaaatttccaaaagaatctatcttcaagaaaggataaaattgatctcttgttcgaggagaacaactttaaacctttcaaatacaacgatttaggtgccttagcatacctgggatccgaaagggccattgcaaccatacgttccggtaagagaacattttacaccggtggtggcttaatgaccttctacttatggagaattttgtacatgtccatgattctatctgcaagatcgagattaaaggtctttttcgactggattaaattagcatttttcaaaagagacttttttaaaggattatag

SEQ ID NO: 666 - DNA, 1542 bp, Artificial Sequence
  source: /note="Description of Artificial Sequence: Synthetic polynucleotide"
atgctatcgaagaatttgtatagtaacaagaggttgctcacctcgacgaatacgctagtcagattcgcttccaccagatccacaggggtggaaaactccggagcaggtcctacatcttttaagaccatgaaaatcattgaccctcagcacagcgacaaaccaaacgtgctgatactgggttcggggtggggagctatttcgtttttaaagcacattgacaccaagaagtacaacgtttccatcatctctcctagaagctatttcatctacacgcctttgttaccttctgcaccagttgggacagtagacgaaaagtcaattattgagcccatcgttaattttgctctcaagaaaaaggggaacgttacctactatgaggcagaagccacctctatcaatcccgacaggaataccgttaccataaaatcattatctgccgttagccagctataccaacctgaaaaccatctagggctgcatcaagcagaacctgctgaaattaagtacgattatttaatcagtgctgtaggtgcggaacctaacacatttggtattcctggggtcactgattacggtcatttcctgaaggaaattcccaactctttggaaataagaagaacttttgccgccaatctagagaaggctaacttattgccaaagggtgatcccgaaagaagaagactactgtccattgtcgtggttggtggtgggcctactggtgtagaggccgctggtgaactacaggattatgttcaccaggacctgagaaagtttctccctgcattggccgaagaagtccaaattcacttggtcgaagctctgcccatcgttttgaatatgtttgagaaaaagctttcatcatacgcgcaatcacatttagaaaacacttcgatcaaagtacatctgagaacggctgtcgccaaagttgaagaaaagcaattgttggcaaagacgaaacacgaagacggtaaaataaccgaagaaactattccatacggtactttgatttgggccacgggtaacaaggcaagaccggtaatcacagaccttttcaagaaaattcctgagcaaaactcgtccaagagaggattggcagtgaatgactttttgcaagtgaaaggcagcaacaacattttcgccattggtgacaatgcatttgctgggttgccaccaaccgcccaagtggcgcaccaagaggccgaatatttggccaagaattttgataaaatggctcaaataccaaatttccaaaagaatctatcttcaagaaaggataaaattgatctcttgttcgaggagaacaactttaaacctttcaaatacaacgatttaggtgccttagcatacctgggatccgaaagggccattgcaaccatacgttccggtaagagaacattttacaccggtggtggcttaatgaccttctacttatggagaattatctacttgtccatgattctatctgcaagatcgagattaaaggtctttttcgactggattaaattagcatttttcaaaagagacttttttaaaggattatag

SEQ ID NO: 667 - DNA, 1542 bp, Artificial Sequence
  source: /note="Description of Artificial Sequence: Synthetic polynucleotide"
atgctatcgaagaatttgtatagtaacaagaggttgctcacctcgacgaatacgctagtcagattcgcttccaccagatccacaggggtggaaaactccggagcaggtcctacatcttttaagaccatgaaagtcattgaccctcagcacagcgacaaaccaaacgtgctgatactgggttcggggtggggagctatttcgtttttaaagcacattgacaccaagaagtacaacgtttccatcatctctcctagaagctatttcttatacacgcctttgttaccttctgcaccagttgggacagtagacgaaaagtcaattattgagcccatcgttaattttgctctcaagaaaaaggggaacgttacctactatgaggcagaagccacctctatcaatcccgacaggaataccgttaccataaaatcattatctgccgttagccagctataccaacctgaaaaccatctagggctgcatcaagcagaacctgctgaaattaagtacgattatttaatcagtgctgtaggtgcggaacctaacacatttggtattcctggggtcactgattacggtcatttcctgaaggaaattcccaactctttggaaataagaagaacttttgccgccaatctagagaaggctaacttattgccaaagggtgatcccgaaagaagaagactactgtccattgtcgtggttggtggtgggcctactggtgtagaggccgctggtgaactacaggattatgttcaccaggacctgagaaagtttctccctgcattggccgaagaaatccaaattcacttggtcgaagctctgcccatcgttttgaatatgtttgagaaaaagctttcatcatacgcgcaatcacatttagaaaacacttcgatcaaagtacatctgagaacggctgtcgccaaagttgaagaaaagcaattgttggcaaagacgaaacacgaagacggtaaaataaccgaagaaactattccatacggtactttgatttgggccacgggtaacaaggcaagaccggtaatcacagaccttttcaagaaaattcctgagcaaaactcgtccaagagaggattggcagtgaatgactttttgcaagtgaaaggcagcaacaacattttcgccattggtgacaatgcatttgctgggttgccaccaaccgcccaagtggcgcaccaagaggccgaatatttggccaagaattttgataaaatggctcaaataccaaatttccaaaagaatctatcttcaagaaaggataaaattgatctcttgttcgaggagaacaactttaaacctttcaaatacaacgatttaggtgccttagcatacctgggatccgaaagggccattgcaaccatacgttccggtaagagaacattttacaccggtggtggcttaatgaccttctacttatggagaattatctacatgtccatgattctatctgcaagatcgagattaaaggtctttttcgactggattaaattagcatttttcaaaagagacttttttaaaggattatag

SEQ ID NO: 668 - DNA, 1542 bp, Artificial Sequence
  source: /note="Description of Artificial Sequence: Synthetic polynucleotide"
atgctatcgaagaatttgtatagtaacaagaggttgctcacctcgacgaatacgctagtcagattcgcttccaccagatccacaggggtggaaaactccggagcaggtcctacatcttttaagaccatgaaaatcattgaccctcagcacagcgacaaaccaaacgtgctgatactgggttcggggtggggagctatttcgtttttaaagcacattgacaccaagaagtacaacgtttccatcatctctcctagaagctatttcttatacacgcctttgttaccttctgcaccagttgggacagtagacgaaaagtcaattattgagcccatcgttaattttgctctcaagaaaaaggggaacgttacctactatgaggcagaagccacctctatcaatcccgacaggaataccgttaccataaaatcattatctgccgttagccagctataccaacctgaaaaccatctagggctgcatcaagcagaacctgctgaaattaagtacgattatttaatcagtgctgtaggtgcggaacctaacacatttggtattcctggggtcactgattacggtcatttcctgaaggaaattcccaactctttggaaataagaagaacttttgccgccaatctagagaaggctaacttattgccaaagggtgatcccgaaagaagaagactactgtccattgtcgtggttggtggtgggcctactggtgtagaggccgctggtgaactacaggattatgttcaccaggacctgagaaagtttctccctgcattggccgaagaaatccaaattcacttggtcgaagctctgcccatcgttttgaatatgtttgagaaaaagctttcatcatacgcgcaatcacatttagaaaacacttcgatcaaagtacatctgagaacggctgtcgccaaagttgaagaaaagcaattgttggcaaagacgaaacacgaagacggtaaaataaccgaagaaactattccatacggtactttgatttgggccacgggtaacaaggcaagaccggtaatcacagaccttttcaagaaaattcctgagcaaaactcgtccaagagaggattggcagtgaatgactttttgcaagtgaaaggcagcaacaacattttcgccattggtgacaatgcatttgctgggttgccaccaaccgcccaagtggcgcaccaagaggccgaatatttggccaagaattttgataaaatggctcaaataccaaatttccaaaagaatctatcttcaagaaaggataaaattgatctcttgttcgaggagaacaactttaaacctttcaaatacaacgatttaggtgccttagcatacctgggatccgaaagggccattgcaaccatacgttccggtaagagaacattttacaccggtggtggcttaatgaccttctacttatggagaattttgtacatgtccatgattctatctgcaagatcgagattaaaggtctttttcgactggattaaattagcatttttcaaaagagacttttttaaaggattatag

SEQ ID NO: 669 - DNA, 1542 bp, Artificial Sequence
  source: /note="Description of Artificial Sequence: Synthetic polynucleotide"
atgctatcgaagaatttgtatagtaacaagaggttgctcacctcgacgaatacgctagtcagattcgcttccaccagatccacaggggtggaaaactccggagcaggtcctacatcttttaagaccatgaaaatcattgaccctcagcacagcgacaaaccaaacgtgctgatactgggttcggggtggggagctatttcgtttttaaagcacattgacaccaagaagtacaacgtttccatcatctctcctagaagctatttcttatacacgcctttgttaccttctgcaccagttgggacagtagacgaaaagtcaattattgagcccatcgttaattttgctctcaagaaaaaggggaacgttacctactatgaggcagaagccacctctatcaatcccgacaggaataccgttaccataaaatcattatctgccgttagccagctataccaacctgaaaaccatctagggctgcatcaagcagaacctgctgaaattaagtacgattatttaatcagtgctgtaggtgcggaacctaacacatttggtattcctggggtcactgattacggtcatttcctgaaggaaattcccaactctttggaaataagaagaacttttgccgccaatctagagaaggctaacttattgccaaagggtgatcccgaaagaagaagactactgtccattgtcgtggttggtggtgggcctactggtgtagaggccgctggtgaactacaggattatgttcaccaggacctgagaaagtttctccctgcattggccgaagaaatccaaattcacttggtcgaagctctgcccatcgttttgaatatgtttgagaaaaagctttcatcatacgcgcaatcacatttagaaaacacttcgatcaaagtacatctgagaacggctgtcgccaaagttgaagaaaagcaattgttggcaaagacgaaacacgaagacggtaaaataaccgaagaaactattccatacggtactttgatttgggccacgggtaacaaggcaagaccggtaatcacagaccttttcaagaaaattcctgagcaaaactcgtccaagagaggattggcagtgaatgactttttgcaagtgaaaggcagcaacaacattttcgccattggtgacaatgcatttgctgggttgccaccaaccgcccaagtggcgcaccaagaggccgaatatttggccaagaattttgataaaatggctcaaataccaaatttccaaaagaatctatcttcaagaaaggataaaattgatctcttgttcgaggagaacaactttaaacctttcaaatacaacgatttaggtgccttagcatacctgggatccgaaagggccattgcaaccatacgttccggtaagagaacattttacaccggtggtggcttaatgaccttctacttatggagaattatctacttgtccatgattctatctgcaagatcgagattaaaggtctttttcgactggattaaattagcatttttcaaaagagacttttttaaaggattatag

SEQ ID NO: 670 - DNA, 1542 bp, Artificial Sequence
  source: /note="Description of Artificial Sequence: Synthetic polynucleotide"
atgctatcgaagaatttgtatagtaacaagaggttgctcacctcgacgaatacgctagtcagattcgcttccaccagatccacaggggtggaaaactccggagcaggtcctacatcttttaagaccatgaaaatcattgaccctcagcacagcgacaaaccaaacgtgctgatactgggttcggggtggggagctatttcgtttttaaagcacattgacaccaagaagtacaacgtttccatcatctctcctagaagctatttcttatacacgcctttgttaccttctgcaccagttgggacagtagacgaaaagtcaattattgagcccatcgttaattttgctctcaagaaaaaggggaacgttacctactatgaggcagaagccacctctatcaatcccgacaggaataccgttaccataaaatcattatctgccgttagccagctataccaacctgaaaaccatctagggctgcatcaagcagaacctgctgaaattaagtacgattatttaatcagtgctgtaggtgcggaacctaacacatttggtattcctggggtcactgattacggtcatttcctgaaggaaattcccaactctttggaaataagaagaacttttgccgccaatctagagaaggctaacttattgccaaagggtgatcccgaaagaagaagactactgtccattgtcgtggttggtggtgggcctactggtgtagaggccgctggtgaactacaggattatgttcaccaggacctgagaaagtttctccctgcattggccgaagaagtccaaattcacttggtcgaagctctgcccatcgttttgaatatgtttgagaaaaagctttcatcatacgcgcaatcacatttagaaaacacttcgatcaaagtacatctgagaacggctgtcgccaaagttgaagaaaagcaattgttggcaaagacgaaacacgaagacggtaaaataaccgaagaaactattccatacggtactttgatttgggccacgggtaacaaggcaagaccggtaatcacagaccttttcaagaaaattcctgagcaaaactcgtccaagagaggattggcagtgaatgactttttgcaagtgaaaggcagcaacaacattttcgccattggtgacaatgcatttgctgggttgccaccaaccgcccaagtggcgcaccaagaggccgaatatttggccaagaattttgataaaatggctcaaataccaaatttccaaaagaatctatcttcaagaaaggataaaattgatctcttgttcgaggagaacaactttaaacctttcaaatacaacgatttaggtgccttagcatacctgggatccgaaagggccattgcaaccatacgttccggtaagagaacattttacaccggtggtggcttaatgaccttctacttatggagaattatctacatgtccatgattctatctgcaagatcgagattaaaggtctttttcgactggattaaattagcatttttcaaaagagacttttttaaaggattatag

SEQ ID NO: 671 - DNA, 1542 bp, Artificial Sequence
  source: /note="Description of Artificial Sequence: Synthetic polynucleotide"
atgctatcgaagaatttgtatagtaacaagaggttgctcacctcgacgaatacgctagtcagattcgcttccaccagatccacaggggtggaaaactccggagcaggtcctacatcttttaagaccatgaaagtcattgaccctcagcacagcgacaaaccaaacgtgctgatactgggttcggggtggggagctatttcgtttttaaagcacattgacaccaagaagtacaacgtttccatcatctctcctagaagctatttcatctttacgcctttgttaccttctgcaccagttgggacagtagacgaaaagtcaattattgagcccatcgttaattttgctctcaagaaaaaggggaacgttacctactatgaggcagaagccacctctatcaatcccgacaggaataccgttaccataaaatcattatctgccgttagccagctataccaacctgaaaaccatctagggctgcatcaagcagaacctgctgaaattaagtacgattatttaatcagtgctgtaggtgcggaacctaacacatttggtattcctggggtcactgattacggtcatttcctgaaggaaattcccaactctttggaaataagaagaacttttgccgccaatctagagaaggctaacttattgccaaagggtgatcccgaaagaagaagactactgtccattgtcgtggttggtggtgggcctactggtgtagaggccgctggtgaactacaggattatgttcaccaggacctgagaaagtttctccctgcattggccgaagaaatccaaattcacttggtcgaagctctgcccatcgttttgaatatgtttgagaaaaagctttcatcatacgcgcaatcacatttagaaaacacttcgatcaaagtacatctgagaacggctgtcgccaaagttgaagaaaagcaattgttggcaaagacgaaacacgaagacggtaaaataaccgaagaaactattccatacggtactttgatttgggccacgggtaacaaggcaagaccggtaatcacagaccttttcaagaaaattcctgagcaaaactcgtccaagagaggattggcagtgaatgactttttgcaagtgaaaggcagcaacaacattttcgccattggtgacaatgcatttgctgggttgccaccaaccgcccaagtggcgcaccaagaggccgaatatttggccaagaattttgataaaatggctcaaataccaaatttccaaaagaatctatcttcaagaaaggataaaattgatctcttgttcgaggagaacaactttaaacctttcaaatacaacgatttaggtgccttagcatacctgggatccgaaagggccattgcaaccatacgttccggtaagagaacattttacaccggtggtggcttaatgaccttctacttatggagaattatctacatgtccatgattctatctgcaagatcgagattaaaggtctttttcgactggattaaattagcatttttcaaaagagacttttttaaaggattatag

SEQ ID NO: 672 - DNA, 1542 bp, Artificial Sequence
  source: /note="Description of Artificial Sequence: Synthetic polynucleotide"
atgctatcgaagaatttgtatagtaacaagaggttgctcacctcgacgaatacgctagtcagattcgcttccaccagatccacaggggtggaaaactccggagcaggtcctacatcttttaagaccatgaaaatcattgaccctcagcacagcgacaaaccaaacgtgctgatactgggttcggggtggggagctatttcgtttttaaagcacattgacaccaagaagtacaacgtttccatcatctctcctagaagctatttcatctttacgcctttgttaccttctgcaccagttgggacagtagacgaaaagtcaattattgagcccatcgttaattttgctctcaagaaaaaggggaacgttacctactatgaggcagaagccacctctatcaatcccgacaggaataccgttaccataaaatcattatctgccgttagccagctataccaacctgaaaaccatctagggctgcatcaagcagaacctgctgaaattaagtacgattatttaatcagtgctgtaggtgcggaacctaacacatttggtattcctggggtcactgattacggtcatttcctgaaggaaattcccaactctttggaaataagaagaacttttgccgccaatctagagaaggctaacttattgccaaagggtgatcccgaaagaagaagactactgtccattgtcgtggttggtggtgggcctactggtgtagaggccgctggtgaactacaggattatgttcaccaggacctgagaaagtttctccctgcattggccgaagaaatccaaattcacttggtcgaagctctgcccatcgttttgaatatgtttgagaaaaagctttcatcatacgcgcaatcacatttagaaaacacttcgatcaaagtacatctgagaacggctgtcgccaaagttgaagaaaagcaattgttggcaaagacgaaacacgaagacggtaaaataaccgaagaaactattccatacggtactttgatttgggccacgggtaacaaggcaagaccggtaatcacagaccttttcaagaaaattcctgagcaaaactcgtccaagagaggattggcagtgaatgactttttgcaagtgaaaggcagcaacaacattttcgccattggtgacaatgcatttgctgggttgccaccaaccgcccaagtggcgcaccaagaggccgaatatttggccaagaattttgataaaatggctcaaataccaaatttccaaaagaatctatcttcaagaaaggataaaattgatctcttgttcgaggagaacaactttaaacctttcaaatacaacgatttaggtgccttagcatacctgggatccgaaagggccattgcaaccatacgttccggtaagagaacattttacaccggtggtggcttaatgaccttctacttatggagaattttgtacatgtccatgattctatctgcaagatcgagattaaaggtctttttcgactggattaaattagcatttttcaaaagagacttttttaaaggattatag

SEQ ID NO: 673 - DNA, 1542 bp, Artificial Sequence
  source: /note="Description of Artificial Sequence: Synthetic polynucleotide"
atgctatcgaagaatttgtatagtaacaagaggttgctcacctcgacgaatacgctagtcagattcgcttccaccagatccacaggggtggaaaactccggagcaggtcctacatcttttaagaccatgaaaatcattgaccctcagcacagcgacaaaccaaacgtgctgatactgggttcggggtggggagctatttcgtttttaaagcacattgacaccaagaagtacaacgtttccatcatctctcctagaagctatttcatctttacgcctttgttaccttctgcaccagttgggacagtagacgaaaagtcaattattgagcccatcgttaattttgctctcaagaaaaaggggaacgttacctactatgaggcagaagccacctctatcaatcccgacaggaataccgttaccataaaatcattatctgccgttagccagctataccaacctgaaaaccatctagggctgcatcaagcagaacctgctgaaattaagtacgattatttaatcagtgctgtaggtgcggaacctaacacatttggtattcctggggtcactgattacggtcatttcctgaaggaaattcccaactctttggaaataagaagaacttttgccgccaatctagagaaggctaacttattgccaaagggtgatcccgaaagaagaagactactgtccattgtcgtggttggtggtgggcctactggtgtagaggccgctggtgaactacaggattatgttcaccaggacctgagaaagtttctccctgcattggccgaagaaatccaaattcacttggtcgaagctctgcccatcgttttgaatatgtttgagaaaaagctttcatcatacgcgcaatcacatttagaaaacacttcgatcaaagtacatctgagaacggctgtcgccaaagttgaagaaaagcaattgttggcaaagacgaaacacgaagacggtaaaataaccgaagaaactattccatacggtactttgatttgggccacgggtaacaaggcaagaccggtaatcacagaccttttcaagaaaattcctgagcaaaactcgtccaagagaggattggcagtgaatgactttttgcaagtgaaaggcagcaacaacattttcgccattggtgacaatgcatttgctgggttgccaccaaccgcccaagtggcgcaccaagaggccgaatatttggccaagaattttgataaaatggctcaaataccaaatttccaaaagaatctatcttcaagaaaggataaaattgatctcttgttcgaggagaacaactttaaacctttcaaatacaacgatttaggtgccttagcatacctgggatccgaaagggccattgcaaccatacgttccggtaagagaacattttacaccggtggtggcttaatgaccttctacttatggagaattatctacttgtccatgattctatctgcaagatcgagattaaaggtctttttcgactggattaaattagcatttttcaaaagagacttttttaaaggattatag

SEQ ID NO: 674 - DNA, 1542 bp, Artificial Sequence
  source: /note="Description of Artificial Sequence: Synthetic polynucleotide"
atgctatcgaagaatttgtatagtaacaagaggttgctcacctcgacgaatacgctagtcagattcgcttccaccagatccacaggggtggaaaactccggagcaggtcctacatcttttaagaccatgaaaatcattgaccctcagcacagcgacaaaccaaacgtgctgatactgggttcggggtggggagctatttcgtttttaaagcacattgacaccaagaagtacaacgtttccatcatctctcctagaagctatttcatctttacgcctttgttaccttctgcaccagttgggacagtagacgaaaagtcaattattgagcccatcgttaattttgctctcaagaaaaaggggaacgttacctactatgaggcagaagccacctctatcaatcccgacaggaataccgttaccataaaatcattatctgccgttagccagctataccaacctgaaaaccatctagggctgcatcaagcagaacctgctgaaattaagtacgattatttaatcagtgctgtaggtgcggaacctaacacatttggtattcctggggtcactgattacggtcatttcctgaaggaaattcccaactctttggaaataagaagaacttttgccgccaatctagagaaggctaacttattgccaaagggtgatcccgaaagaagaagactactgtccattgtcgtggttggtggtgggcctactggtgtagaggccgctggtgaactacaggattatgttcaccaggacctgagaaagtttctccctgcattggccgaagaagtccaaattcacttggtcgaagctctgcccatcgttttgaatatgtttgagaaaaagctttcatcatacgcgcaatcacatttagaaaacacttcgatcaaagtacatctgagaacggctgtcgccaaagttgaagaaaagcaattgttggcaaagacgaaacacgaagacggtaaaataaccgaagaaactattccatacggtactttgatttgggccacgggtaacaaggcaagaccggtaatcacagaccttttcaagaaaattcctgagcaaaactcgtccaagagaggattggcagtgaatgactttttgcaagtgaaaggcagcaacaacattttcgccattggtgacaatgcatttgctgggttgccaccaaccgcccaagtggcgcaccaagaggccgaatatttggccaagaattttgataaaatggctcaaataccaaatttccaaaagaatctatcttcaagaaaggataaaattgatctcttgttcgaggagaacaactttaaacctttcaaatacaacgatttaggtgccttagcatacctgggatccgaaagggccattgcaaccatacgttccggtaagagaacattttacaccggtggtggcttaatgaccttctacttatggagaattatctacatgtccatgattctatctgcaagatcgagattaaaggtctttttcgactggattaaattagcatttttcaaaagagacttttttaaaggattatag

SEQ ID NO: 675 - DNA, 1542 bp, Artificial Sequence
  source: /note="Description of Artificial Sequence: Synthetic polynucleotide"
atgctatcgaagaatttgtatagtaacaagaggttgctcacctcgacgaatacgctagtcagattcgcttccaccagatccacaggggtggaaaactccggagcaggtcctacatcttttaagaccatgaaaatcattgaccctcagcacagcgacaaaccaaacgtgctgatactgggttcggggtggggagctatttcgtttttaaagcacattgacaccaagaagtacaacgtttccatcatctctcctagaagctatttcttatttacgcctttgttaccttctgcaccagttgggacagtagacgaaaagtcaattattgagcccatcgttaattttgctctcaagaaaaaggggaacgttacctactatgaggcagaagccacctctatcaatcccgacaggaataccgttaccataaaatcattatctgccgttagccagctataccaacctgaaaaccatctagggctgcatcaagcagaacctgctgaaattaagtacgattatttaatcagtgctgtaggtgcggaacctaacacatttggtattcctggggtcactgattacggtcatttcctgaaggaaattcccaactctttggaaataagaagaacttttgccgccaatctagagaaggctaacttattgccaaagggtgatcccgaaagaagaagactactgtccattgtcgtggttggtggtgggcctactggtgtagaggccgctggtgaactacaggattatgttcaccaggacctgagaaagtttctccctgcattggccgaagaaatccaaattcacttggtcgaagctctgcccatcgttttgaatatgtttgagaaaaagctttcatcatacgcgcaatcacatttagaaaacacttcgatcaaagtacatctgagaacggctgtcgccaaagttgaagaaaagcaattgttggcaaagacgaaacacgaagacggtaaaataaccgaagaaactattccatacggtactttgatttgggccacgggtaacaaggcaagaccggtaatcacagaccttttcaagaaaattcctgagcaaaactcgtccaagagaggattggcagtgaatgactttttgcaagtgaaaggcagcaacaacattttcgccattggtgacaatgcatttgctgggttgccaccaaccgcccaagtggcgcaccaagaggccgaatatttggccaagaattttgataaaatggctcaaataccaaatttccaaaagaatctatcttcaagaaaggataaaattgatctcttgttcgaggagaacaactttaaacctttcaaatacaacgatttaggtgccttagcatacctgggatccgaaagggccattgcaaccatacgttccggtaagagaacattttacaccggtggtggcttaatgaccttctacttatggagaattatctacatgtccatgattctatctgcaagatcgagattaaaggtctttttcgactggattaaattagcatttttcaaaagagacttttttaaaggattatag

SEQ ID NO: 676 - DNA, 1542 bp, Artificial Sequence
  source: /note="Description of Artificial Sequence: Synthetic polynucleotide"
atgctatcgaagaatttgtatagtaacaagaggttgctcacctcgacgaatacgctagtcagattcgcttccaccagatccacaggggtggaaaactccggagcaggtcctacatcttttaagaccatgaaagtcattgaccctcagcacagcgacaaaccaaacgtgctgatactgggttcggggtggggagctatttcgtttttaaagcacattgacaccaagaagtacaacgtttccatcgtgtctcctagaagctatttcatctacacgcctttgttaccttctgcaccagttgggacagtagacgaaaagtcaattattgagcccatcgttaattttgctctcaagaaaaaggggaacgttacctactatgaggcagaagccacctctatcaatcccgacaggaataccgttaccataaaatcattatctgccgttagccagctataccaacctgaaaaccatctagggctgcatcaagcagaacctgctgaaattaagtacgattatttaatcagtgctgtaggtgcggaacctaacacatttggtattcctggggtcactgattacggtcatttcctgaaggaaattcccaactctttggaaataagaagaacttttgccgccaatctagagaaggctaacttattgccaaagggtgatcccgaaagaagaagactactgtccattgtcgtggttggtggtgggcctactggtgtagaggccgctggtgaactacaggattatgttcaccaggacctgagaaagtttctccctgcattggccgaagaaatccaaattcacttggtcgaagctctgcccatcgttttgaatatgtttgagaaaaagctttcatcatacgcgcaatcacatttagaaaacacttcgatcaaagtacatctgagaacggctgtcgccaaagttgaagaaaagcaattgttggcaaagacgaaacacgaagacggtaaaataaccgaagaaactattccatacggtactttgatttgggccacgggtaacaaggcaagaccggtaatcacagaccttttcaagaaaattcctgagcaaaactcgtccaagagaggattggcagtgaatgactttttgcaagtgaaaggcagcaacaacattttcgccattggtgacaatgcatttgctgggttgccaccaaccgcccaagtggcgcaccaagaggccgaatatttggccaagaattttgataaaatggctcaaataccaaatttccaaaagaatctatcttcaagaaaggataaaattgatctcttgttcgaggagaacaactttaaacctttcaaatacaacgatttaggtgccttagcatacctgggatccgaaagggccattgcaaccatacgttccggtaagagaacattttacaccggtggtggcttaatgaccttctacttatggagaattttgtacatgtccatgattctatctgcaagatcgagattaaaggtctttttcgactggattaaattagcatttttcaaaagagacttttttaaaggattatag

SEQ ID NO: 677 - DNA, 1542 bp, Artificial Sequence
  source: /note="Description of Artificial Sequence: Synthetic polynucleotide"
atgctatcgaagaatttgtatagtaacaagaggttgctcacctcgacgaatacgctagtcagattcgcttccaccagatccacaggggtggaaaactccggagcaggtcctacatcttttaagaccatgaaagtcattgaccctcagcacagcgacaaaccaaacgtgctgatactgggttcggggtggggagctatttcgtttttaaagcacattgacaccaagaagtacaacgtttccatcgtgtctcctagaagctatttcatctacacgcctttgttaccttctgcaccagttgggacagtagacgaaaagtcaattattgagcccatcgttaattttgctctcaagaaaaaggggaacgttacctactatgaggcagaagccacctctatcaatcccgacaggaataccgttaccataaaatcattatctgccgttagccagctataccaacctgaaaaccatctagggctgcatcaagcagaacctgctgaaattaagtacgattatttaatcagtgctgtaggtgcggaacctaacacatttggtattcctggggtcactgattacggtcatttcctgaaggaaattcccaactctttggaaataagaagaacttttgccgccaatctagagaaggctaacttattgccaaagggtgatcccgaaagaagaagactactgtccattgtcgtggttggtggtgggcctactggtgtagaggccgctggtgaactacaggattatgttcaccaggacctgagaaagtttctccctgcattggccgaagaaatccaaattcacttggtcgaagctctgcccatcgttttgaatatgtttgagaaaaagctttcatcatacgcgcaatcacatttagaaaacacttcgatcaaagtacatctgagaacggctgtcgccaaagttgaagaaaagcaattgttggcaaagacgaaacacgaagacggtaaaataaccgaagaaactattccatacggtactttgatttgggccacgggtaacaaggcaagaccggtaatcacagaccttttcaagaaaattcctgagcaaaactcgtccaagagaggattggcagtgaatgactttttgcaagtgaaaggcagcaacaacattttcgccattggtgacaatgcatttgctgggttgccaccaaccgcccaagtggcgcaccaagaggccgaatatttggccaagaattttgataaaatggctcaaataccaaatttccaaaagaatctatcttcaagaaaggataaaattgatctcttgttcgaggagaacaactttaaacctttcaaatacaacgatttaggtgccttagcatacctgggatccgaaagggccattgcaaccatacgttccggtaagagaacattttacaccggtggtggcttaatgaccttctacttatggagaattatctacttgtccatgattctatctgcaagatcgagattaaaggtctttttcgactggattaaattagcatttttcaaaagagacttttttaaaggattatag

SEQ ID NO: 678 - DNA, 1542 bp, Artificial Sequence
  source: /note="Description of Artificial Sequence: Synthetic polynucleotide"
atgctatcgaagaatttgtatagtaacaagaggttgctcacctcgacgaatacgctagtcagattcgcttccaccagatccacaggggtggaaaactccggagcaggtcctacatcttttaagaccatgaaaatcattgaccctcagcacagcgacaaaccaaacgtgctgatactgggttcggggtggggagctatttcgtttttaaagcacattgacaccaagaagtacaacgtttccatcgtgtctcctagaagctatttcatctacacgcctttgttaccttctgcaccagttgggacagtagacgaaaagtcaattattgagcccatcgttaattttgctctcaagaaaaaggggaacgttacctactatgaggcagaagccacctctatcaatcccgacaggaataccgttaccataaaatcattatctgccgttagccagctataccaacctgaaaaccatctagggctgcatcaagcagaacctgctgaaattaagtacgattatttaatcagtgctgtaggtgcggaacctaacacatttggtattcctggggtcactgattacggtcatttcctgaaggaaattcccaactctttggaaataagaagaacttttgccgccaatctagagaaggctaacttattgccaaagggtgatcccgaaagaagaagactactgtccattgtcgtggttggtggtgggcctactggtgtagaggccgctggtgaactacaggattatgttcaccaggacctgagaaagtttctccctgcattggccgaagaaatccaaattcacttggtcgaagctctgcccatcgttttgaatatgtttgagaaaaagctttcatcatacgcgcaatcacatttagaaaacacttcgatcaaagtacatctgagaacggctgtcgccaaagttgaagaaaagcaattgttggcaaagacgaaacacgaagacggtaaaataaccgaagaaactattccatacggtactttgatttgggccacgggtaacaaggcaagaccggtaatcacagaccttttcaagaaaattcctgagcaaaactcgtccaagagaggattggcagtgaatgactttttgcaagtgaaaggcagcaacaacattttcgccattggtgacaatgcatttgctgggttgccaccaaccgcccaagtggcgcaccaagaggccgaatatttggccaagaattttgataaaatggctcaaataccaaatttccaaaagaatctatcttcaagaaaggataaaattgatctcttgttcgaggagaacaactttaaacctttcaaatacaacgatttaggtgccttagcatacctgggatccgaaagggccattgcaaccatacgttccggtaagagaacattttacaccggtggtggcttaatgaccttctacttatggagaattttgtacttgtccatgattctatctgcaagatcgagattaaaggtctttttcgactggattaaattagcatttttcaaaagagacttttttaaaggattatag

SEQ ID NO: 679 - DNA, 1542 bp, Artificial Sequence
  source: /note="Description of Artificial Sequence: Synthetic polynucleotide"
atgctatcgaagaatttgtatagtaacaagaggttgctcacctcgacgaatacgctagtcagattcgcttccaccagatccacaggggtggaaaactccggagcaggtcctacatcttttaagaccatgaaagtcattgaccctcagcacagcgacaaaccaaacgtgctgatactgggttcggggtggggagctatttcgtttttaaagcacattgacaccaagaagtacaacgtttccatcgtgtctcctagaagctatttcatctacacgcctttgttaccttctgcaccagttgggacagtagacgaaaagtcaattattgagcccatcgttaattttgctctcaagaaaaaggggaacgttacctactatgaggcagaagccacctctatcaatcccgacaggaataccgttaccataaaatcattatctgccgttagccagctataccaacctgaaaaccatctagggctgcatcaagcagaacctgctgaaattaagtacgattatttaatcagtgctgtaggtgcggaacctaacacatttggtattcctggggtcactgattacggtcatttcctgaaggaaattcccaactctttggaaataagaagaacttttgccgccaatctagagaaggctaacttattgccaaagggtgatcccgaaagaagaagactactgtccattgtcgtggttggtggtgggcctactggtgtagaggccgctggtgaactacaggattatgttcaccaggacctgagaaagtttctccctgcattggccgaagaagtccaaattcacttggtcgaagctctgcccatcgttttgaatatgtttgagaaaaagctttcatcatacgcgcaatcacatttagaaaacacttcgatcaaagtacatctgagaacggctgtcgccaaagttgaagaaaagcaattgttggcaaagacgaaacacgaagacggtaaaataaccgaagaaactattccatacggtactttgatttgggccacgggtaacaaggcaagaccggtaatcacagaccttttcaagaaaattcctgagcaaaactcgtccaagagaggattggcagtgaatgactttttgcaagtgaaaggcagcaacaacattttcgccattggtgacaatgcatttgctgggttgccaccaaccgcccaagtggcgcaccaagaggccgaatatttggccaagaattttgataaaatggctcaaataccaaatttccaaaagaatctatcttcaagaaaggataaaattgatctcttgttcgaggagaacaactttaaacctttcaaatacaacgatttaggtgccttagcatacctgggatccgaaagggccattgcaaccatacgttccggtaagagaacattttacaccggtggtggcttaatgaccttctacttatggagaattatctacatgtccatgattctatctgcaagatcgagattaaaggtctttttcgactggattaaattagcatttttcaaaagagacttttttaaaggattatag

SEQ ID NO: 680 - DNA, 1542 bp, Artificial Sequence
  source: /note="Description of Artificial Sequence: Synthetic polynucleotide"
atgctatcgaagaatttgtatagtaacaagaggttgctcacctcgacgaatacgctagtcagattcgcttccaccagatccacaggggtggaaaactccggagcaggtcctacatcttttaagaccatgaaaatcattgaccctcagcacagcgacaaaccaaacgtgctgatactgggttcggggtggggagctatttcgtttttaaagcacattgacaccaagaagtacaacgtttccatcgtgtctcctagaagctatttcatctacacgcctttgttaccttctgcaccagttgggacagtagacgaaaagtcaattattgagcccatcgttaattttgctctcaagaaaaaggggaacgttacctactatgaggcagaagccacctctatcaatcccgacaggaataccgttaccataaaatcattatctgccgttagccagctataccaacctgaaaaccatctagggctgcatcaagcagaacctgctgaaattaagtacgattatttaatcagtgctgtaggtgcggaacctaacacatttggtattcctggggtcactgattacggtcatttcctgaaggaaattcccaactctttggaaataagaagaacttttgccgccaatctagagaaggctaacttattgccaaagggtgatcccgaaagaagaagactactgtccattgtcgtggttggtggtgggcctactggtgtagaggccgctggtgaactacaggattatgttcaccaggacctgagaaagtttctccctgcattggccgaagaagtccaaattcacttggtcgaagctctgcccatcgttttgaatatgtttgagaaaaagctttcatcatacgcgcaatcacatttagaaaacacttcgatcaaagtacatctgagaacggctgtcgccaaagttgaagaaaagcaattgttggcaaagacgaaacacgaagacggtaaaataaccgaagaaactattccatacggtactttgatttgggccacgggtaacaaggcaagaccggtaatcacagaccttttcaagaaaattcctgagcaaaactcgtccaagagaggattggcagtgaatgactttttgcaagtgaaaggcagcaacaacattttcgccattggtgacaatgcatttgctgggttgccaccaaccgcccaagtggcgcaccaagaggccgaatatttggccaagaattttgataaaatggctcaaataccaaatttccaaaagaatctatcttcaagaaaggataaaattgatctcttgttcgaggagaacaactttaaacctttcaaatacaacgatttaggtgccttagcatacctgggatccgaaagggccattgcaaccatacgttccggtaagagaacattttacaccggtggtggcttaatgaccttctacttatggagaattttgtacatgtccatgattctatctgcaagatcgagattaaaggtctttttcgactggattaaattagcatttttcaaaagagacttttttaaaggattatag

SEQ ID NO: 681 - DNA, 1542 bp, Artificial Sequence
  source: /note="Description of Artificial Sequence: Synthetic polynucleotide"
atgctatcgaagaatttgtatagtaacaagaggttgctcacctcgacgaatacgctagtcagattcgcttccaccagatccacaggggtggaaaactccggagcaggtcctacatcttttaagaccatgaaaatcattgaccctcagcacagcgacaaaccaaacgtgctgatactgggttcggggtggggagctatttcgtttttaaagcacattgacaccaagaagtacaacgtttccatcgtgtctcctagaagctatttcatctacacgcctttgttaccttctgcaccagttgggacagtagacgaaaagtcaattattgagcccatcgttaattttgctctcaagaaaaaggggaacgttacctactatgaggcagaagccacctctatcaatcccgacaggaataccgttaccataaaatcattatctgccgttagccagctataccaacctgaaaaccatctagggctgcatcaagcagaacctgctgaaattaagtacgattatttaatcagtgctgtaggtgcggaacctaacacatttggtattcctggggtcactgattacggtcatttcctgaaggaaattcccaactctttggaaataagaagaacttttgccgccaatctagagaaggctaacttattgccaaagggtgatcccgaaagaagaagactactgtccattgtcgtggttggtggtgggcctactggtgtagaggccgctggtgaactacaggattatgttcaccaggacctgagaaagtttctccctgcattggccgaagaagtccaaattcacttggtcgaagctctgcccatcgttttgaatatgtttgagaaaaagctttcatcatacgcgcaatcacatttagaaaacacttcgatcaaagtacatctgagaacggctgtcgccaaagttgaagaaaagcaattgttggcaaagacgaaacacgaagacggtaaaataaccgaagaaactattccatacggtactttgatttgggccacgggtaacaaggcaagaccggtaatcacagaccttttcaagaaaattcctgagcaaaactcgtccaagagaggattggcagtgaatgactttttgcaagtgaaaggcagcaacaacattttcgccattggtgacaatgcatttgctgggttgccaccaaccgcccaagtggcgcaccaagaggccgaatatttggccaagaattttgataaaatggctcaaataccaaatttccaaaagaatctatcttcaagaaaggataaaattgatctcttgttcgaggagaacaactttaaacctttcaaatacaacgatttaggtgccttagcatacctgggatccgaaagggccattgcaaccatacgttccggtaagagaacattttacaccggtggtggcttaatgaccttctacttatggagaattatctacttgtccatgattctatctgcaagatcgagattaaaggtctttttcgactggattaaattagcatttttcaaaagagacttttttaaaggattatag

SEQ ID NO: 682 - DNA, 1542 bp, Artificial Sequence
  source: /note="Description of Artificial Sequence: Synthetic polynucleotide"
atgctatcgaagaatttgtatagtaacaagaggttgctcacctcgacgaatacgctagtcagattcgcttccaccagatccacaggggtggaaaactccggagcaggtcctacatcttttaagaccatgaaagtcattgaccctcagcacagcgacaaaccaaacgtgctgatactgggttcggggtggggagctatttcgtttttaaagcacattgacaccaagaagtacaacgtttccatcgtgtctcctagaagctatttcttatacacgcctttgttaccttctgcaccagttgggacagtagacgaaaagtcaattattgagcccatcgttaattttgctctcaagaaaaaggggaacgttacctactatgaggcagaagccacctctatcaatcccgacaggaataccgttaccataaaatcattatctgccgttagccagctataccaacctgaaaaccatctagggctgcatcaagcagaacctgctgaaattaagtacgattatttaatcagtgctgtaggtgcggaacctaacacatttggtattcctggggtcactgattacggtcatttcctgaaggaaattcccaactctttggaaataagaagaacttttgccgccaatctagagaaggctaacttattgccaaagggtgatcccgaaagaagaagactactgtccattgtcgtggttggtggtgggcctactggtgtagaggccgctggtgaactacaggattatgttcaccaggacctgagaaagtttctccctgcattggccgaagaaatccaaattcacttggtcgaagctctgcccatcgttttgaatatgtttgagaaaaagctttcatcatacgcgcaatcacatttagaaaacacttcgatcaaagtacatctgagaacggctgtcgccaaagttgaagaaaagcaattgttggcaaagacgaaacacgaagacggtaaaataaccgaagaaactattccatacggtactttgatttgggccacgggtaacaaggcaagaccggtaatcacagaccttttcaagaaaattcctgagcaaaactcgtccaagagaggattggcagtgaatgactttttgcaagtgaaaggcagcaacaacattttcgccattggtgacaatgcatttgctgggttgccaccaaccgcccaagtggcgcaccaagaggccgaatatttggccaagaattttgataaaatggctcaaataccaaatttccaaaagaatctatcttcaagaaaggataaaattgatctcttgttcgaggagaacaactttaaacctttcaaatacaacgatttaggtgccttagcatacctgggatccgaaagggccattgcaaccatacgttccggtaagagaacattttacaccggtggtggcttaatgaccttctacttatggagaattatctacatgtccatgattctatctgcaagatcgagattaaaggtctttttcgactggattaaattagcatttttcaaaagagacttttttaaaggattatag

SEQ ID NO: 683 - DNA, 1542 bp, Artificial Sequence
  source: /note="Description of Artificial Sequence: Synthetic polynucleotide"
atgctatcgaagaatttgtatagtaacaagaggttgctcacctcgacgaatacgctagtcagattcgcttccaccagatccacaggggtggaaaactccggagcaggtcctacatcttttaagaccatgaaaatcattgaccctcagcacagcgacaaaccaaacgtgctgatactgggttcggggtggggagctatttcgtttttaaagcacattgacaccaagaagtacaacgtttccatcgtgtctcctagaagctatttcttatacacgcctttgttaccttctgcaccagttgggacagtagacgaaaagtcaattattgagcccatcgttaattttgctctcaagaaaaaggggaacgttacctactatgaggcagaagccacctctatcaatcccgacaggaataccgttaccataaaatcattatctgccgttagccagctataccaacctgaaaaccatctagggctgcatcaagcagaacctgctgaaattaagtacgattatttaatcagtgctgtaggtgcggaacctaacacatttggtattcctggggtcactgattacggtcatttcctgaaggaaattcccaactctttggaaataagaagaacttttgccgccaatctagagaaggctaacttattgccaaagggtgatcccgaaagaagaagactactgtccattgtcgtggttggtggtgggcctactggtgtagaggccgctggtgaactacaggattatgttcaccaggacctgagaaagtttctccctgcattggccgaagaaatccaaattcacttggtcgaagctctgcccatcgttttgaatatgtttgagaaaaagctttcatcatacgcgcaatcacatttagaaaacacttcgatcaaagtacatctgagaacggctgtcgccaaagttgaagaaaagcaattgttggcaaagacgaaacacgaagacggtaaaataaccgaagaaactattccatacggtactttgatttgggccacgggtaacaaggcaagaccggtaatcacagaccttttcaagaaaattcctgagcaaaactcgtccaagagaggattggcagtgaatgactttttgcaagtgaaaggcagcaacaacattttcgccattggtgacaatgcatttgctgggttgccaccaaccgcccaagtggcgcaccaagaggccgaatatttggccaagaattttgataaaatggctcaaataccaaatttccaaaagaatctatcttcaagaaaggataaaattgatctcttgttcgaggagaacaactttaaacctttcaaatacaacgatttaggtgccttagcatacctgggatccgaaagggccattgcaaccatacgttccggtaagagaacattttacaccggtggtggcttaatgaccttctacttatggagaattttgtacatgtccatgattctatctgcaagatcgagattaaaggtctttttcgactggattaaattagcatttttcaaaagagacttttttaaaggattatag

SEQ ID NO: 684 - DNA, 1542 bp, Artificial Sequence
  source: /note="Description of Artificial Sequence: Synthetic polynucleotide"
atgctatcgaagaatttgtatagtaacaagaggttgctcacctcgacgaatacgctagtcagattcgcttccaccagatccacaggggtggaaaactccggagcaggtcctacatcttttaagaccatgaaaatcattgaccctcagcacagcgacaaaccaaacgtgctgatactgggttcggggtggggagctatttcgtttttaaagcacattgacaccaagaagtacaacgtttccatcgtgtctcctagaagctatttcttatacacgcctttgttaccttctgcaccagttgggacagtagacgaaaagtcaattattgagcccatcgttaattttgctctcaagaaaaaggggaacgttacctactatgaggcagaagccacctctatcaatcccgacaggaataccgttaccataaaatcattatctgccgttagccagctataccaacctgaaaaccatctagggctgcatcaagcagaacctgctgaaattaagtacgattatttaatcagtgctgtaggtgcggaacctaacacatttggtattcctggggtcactgattacggtcatttcctgaaggaaattcccaactctttggaaataagaagaacttttgccgccaatctagagaaggctaacttattgccaaagggtgatcccgaaagaagaagactactgtccattgtcgtggttggtggtgggcctactggtgtagaggccgctggtgaactacaggattatgttcaccaggacctgagaaagtttctccctgcattggccgaagaaatccaaattcacttggtcgaagctctgcccatcgttttgaatatgtttgagaaaaagctttcatcatacgcgcaatcacatttagaaaacacttcgatcaaagtacatctgagaacggctgtcgccaaagttgaagaaaagcaattgttggcaaagacgaaacacgaagacggtaaaataaccgaagaaactattccatacggtactttgatttgggccacgggtaacaaggcaagaccggtaatcacagaccttttcaagaaaattcctgagcaaaactcgtccaagagaggattggcagtgaatgactttttgcaagtgaaaggcagcaacaacattttcgccattggtgacaatgcatttgctgggttgccaccaaccgcccaagtggcgcaccaagaggccgaatatttggccaagaattttgataaaatggctcaaataccaaatttccaaaagaatctatcttcaagaaaggataaaattgatctcttgttcgaggagaacaactttaaacctttcaaatacaacgatttaggtgccttagcatacctgggatccgaaagggccattgcaaccatacgttccggtaagagaacattttacaccggtggtggcttaatgaccttctacttatggagaattatctacttgtccatgattctatctgcaagatcgagattaaaggtctttttcgactggattaaattagcatttttcaaaagagacttttttaaaggattatag

SEQ ID NO: 685 - DNA, 1542 bp, Artificial Sequence
  source: /note="Description of Artificial Sequence: Synthetic polynucleotide"
atgctatcgaagaatttgtatagtaacaagaggttgctcacctcgacgaatacgctagtcagattcgcttccaccagatccacaggggtggaaaactccggagcaggtcctacatcttttaagaccatgaaaatcattgaccctcagcacagcgacaaaccaaacgtgctgatactgggttcggggtggggagctatttcgtttttaaagcacattgacaccaagaagtacaacgtttccatcgtgtctcctagaagctatttcttatacacgcctttgttaccttctgcaccagttgggacagtagacgaaaagtcaattattgagcccatcgttaattttgctctcaagaaaaaggggaacgttacctactatgaggcagaagccacctctatcaatcccgacaggaataccgttaccataaaatcattatctgccgttagccagctataccaacctgaaaaccatctagggctgcatcaagcagaacctgctgaaattaagtacgattatttaatcagtgctgtaggtgcggaacctaacacatttggtattcctggggtcactgattacggtcatttcctgaaggaaattcccaactctttggaaataagaagaacttttgccgccaatctagagaaggctaacttattgccaaagggtgatcccgaaagaagaagactactgtccattgtcgtggttggtggtgggcctactggtgtagaggccgctggtgaactacaggattatgttcaccaggacctgagaaagtttctccctgcattggccgaagaagtccaaattcacttggtcgaagctctgcccatcgttttgaatatgtttgagaaaaagctttcatcatacgcgcaatcacatttagaaaacacttcgatcaaagtacatctgagaacggctgtcgccaaagttgaagaaaagcaattgttggcaaagacgaaacacgaagacggtaaaataaccgaagaaactattccatacggtactttgatttgggccacgggtaacaaggcaagaccggtaatcacagaccttttcaagaaaattcctgagcaaaactcgtccaagagaggattggcagtgaatgactttttgcaagtgaaaggcagcaacaacattttcgccattggtgacaatgcatttgctgggttgccaccaaccgcccaagtggcgcaccaagaggccgaatatttggccaagaattttgataaaatggctcaaataccaaatttccaaaagaatctatcttcaagaaaggataaaattgatctcttgttcgaggagaacaactttaaacctttcaaatacaacgatttaggtgccttagcatacctgggatccgaaagggccattgcaaccatacgttccggtaagagaacattttacaccggtggtggcttaatgaccttctacttatggagaattatctacatgtccatgattctatctgcaagatcgagattaaaggtctttttcgactggattaaattagcatttttcaaaagagacttttttaaaggattatag

SEQ ID NO: 686 - DNA, 1542 bp, Artificial Sequence
  source: /note="Description of Artificial Sequence: Synthetic polynucleotide"
atgctatcgaagaatttgtatagtaacaagaggttgctcacctcgacgaatacgctagtcagattcgcttccaccagatccacaggggtggaaaactccggagcaggtcctacatcttttaagaccatgaaagtcattgaccctcagcacagcgacaaaccaaacgtgctgatactgggttcggggtggggagctatttcgtttttaaagcacattgacaccaagaagtacaacgtttccatcgtgtctcctagaagctatttcatctttacgcctttgttaccttctgcaccagttgggacagtagacgaaaagtcaattattgagcccatcgttaattttgctctcaagaaaaaggggaacgttacctactatgaggcagaagccacctctatcaatcccgacaggaataccgttaccataaaatcattatctgccgttagccagctataccaacctgaaaaccatctagggctgcatcaagcagaacctgctgaaattaagtacgattatttaatcagtgctgtaggtgcggaacctaacacatttggtattcctggggtcactgattacggtcatttcctgaaggaaattcccaactctttggaaataagaagaacttttgccgccaatctagagaaggctaacttattgccaaagggtgatcccgaaagaagaagactactgtccattgtcgtggttggtggtgggcctactggtgtagaggccgctggtgaactacaggattatgttcaccaggacctgagaaagtttctccctgcattggccgaagaaatccaaattcacttggtcgaagctctgcccatcgttttgaatatgtttgagaaaaagctttcatcatacgcgcaatcacatttagaaaacacttcgatcaaagtacatctgagaacggctgtcgccaaagttgaagaaaagcaattgttggcaaagacgaaacacgaagacggtaaaataaccgaagaaactattccatacggtactttgatttgggccacgggtaacaaggcaagaccggtaatcacagaccttttcaagaaaattcctgagcaaaactcgtccaagagaggattggcagtgaatgactttttgcaagtgaaaggcagcaacaacattttcgccattggtgacaatgcatttgctgggttgccaccaaccgcccaagtggcgcaccaagaggccgaatatttggccaagaattttgataaaatggctcaaataccaaatttccaaaagaatctatcttcaagaaaggataaaattgatctcttgttcgaggagaacaactttaaacctttcaaatacaacgatttaggtgccttagcatacctgggatccgaaagggccattgcaaccatacgttccggtaagagaacattttacaccggtggtggcttaatgaccttctacttatggagaattatctacatgtccatgattctatctgcaagatcgagattaaaggtctttttcgactggattaaattagcatttttcaaaagagacttttttaaaggattatag

SEQ ID NO: 687 - DNA, 1542 bp, Artificial Sequence
  source: /note="Description of Artificial Sequence: Synthetic polynucleotide"
atgctatcgaagaatttgtatagtaacaagaggttgctcacctcgacgaatacgctagtcagattcgcttccaccagatccacaggggtggaaaactccggagcaggtcctacatcttttaagaccatgaaaatcattgaccctcagcacagcgacaaaccaaacgtgctgatactgggttcggggtggggagctatttcgtttttaaagcacattgacaccaagaagtacaacgtttccatcgtgtctcctagaagctatttcatctttacgcctttgttaccttctgcaccagttgggacagtagacgaaaagtcaattattgagcccatcgttaattttgctctcaagaaaaaggggaacgttacctactatgaggcagaagccacctctatcaatcccgacaggaataccgttaccataaaatcattatctgccgttagccagctataccaacctgaaaaccatctagggctgcatcaagcagaacctgctgaaattaagtacgattatttaatcagtgctgtaggtgcggaacctaacacatttggtattcctggggtcactgattacggtcatttcctgaaggaaattcccaactctttggaaataagaagaacttttgccgccaatctagagaaggctaacttattgccaaagggtgatcccgaaagaagaagactactgtccattgtcgtggttggtggtgggcctactggtgtagaggccgctggtgaactacaggattatgttcaccaggacctgagaaagtttctccctgcattggccgaagaaatccaaattcacttggtcgaagctctgcccatcgttttgaatatgtttgagaaaaagctttcatcatacgcgcaatcacatttagaaaacacttcgatcaaagtacatctgagaacggctgtcgccaaagttgaagaaaagcaattgttggcaaagacgaaacacgaagacggtaaaataaccgaagaaactattccatacggtactttgatttgggccacgggtaacaaggcaagaccggtaatcacagaccttttcaagaaaattcctgagcaaaactcgtccaagagaggattggcagtgaatgactttttgcaagtgaaaggcagcaacaacattttcgccattggtgacaatgcatttgctgggttgccaccaaccgcccaagtggcgcaccaagaggccgaatatttggccaagaattttgataaaatggctcaaataccaaatttccaaaagaatctatcttcaagaaaggataaaattgatctcttgttcgaggagaacaactttaaacctttcaaatacaacgatttaggtgccttagcatacctgggatccgaaagggccattgcaaccatacgttccggtaagagaacattttacaccggtggtggcttaatgaccttctacttatggagaattttgtacatgtccatgattctatctgcaagatcgagattaaaggtctttttcgactggattaaattagcatttttcaaaagagacttttttaaaggattatag

SEQ ID NO: 688 - DNA, 1542 bp, Artificial Sequence
  source: /note="Description of Artificial Sequence: Synthetic polynucleotide"
atgctatcgaagaatttgtatagtaacaagaggttgctcacctcgacgaatacgctagtcagattcgcttccaccagatccacaggggtggaaaactccggagcaggtcctacatcttttaagaccatgaaaatcattgaccctcagcacagcgacaaaccaaacgtgctgatactgggttcggggtggggagctatttcgtttttaaagcacattgacaccaagaagtacaacgtttccatcgtgtctcctagaagctatttcatctttacgcctttgttaccttctgcaccagttgggacagtagacgaaaagtcaattattgagcccatcgttaattttgctctcaagaaaaaggggaacgttacctactatgaggcagaagccacctctatcaatcccgacaggaataccgttaccataaaatcattatctgccgttagccagctataccaacctgaaaaccatctagggctgcatcaagcagaacctgctgaaattaagtacgattatttaatcagtgctgtaggtgcggaacctaacacatttggtattcctggggtcactgattacggtcatttcctgaaggaaattcccaactctttggaaataagaagaacttttgccgccaatctagagaaggctaacttattgccaaagggtgatcccgaaagaagaagactactgtccattgtcgtggttggtggtgggcctactggtgtagaggccgctggtgaactacaggattatgttcaccaggacctgagaaagtttctccctgcattggccgaagaaatccaaattcacttggtcgaagctctgcccatcgttttgaatatgtttgagaaaaagctttcatcatacgcgcaatcacatttagaaaacacttcgatcaaagtacatctgagaacggctgtcgccaaagttgaagaaaagcaattgttggcaaagacgaaacacgaagacggtaaaataaccgaagaaactattccatacggtactttgatttgggccacgggtaacaaggcaagaccggtaatcacagaccttttcaagaaaattcctgagcaaaactcgtccaagagaggattggcagtgaatgactttttgcaagtgaaaggcagcaacaacattttcgccattggtgacaatgcatttgctgggttgccaccaaccgcccaagtggcgcaccaagaggccgaatatttggccaagaattttgataaaatggctcaaataccaaatttccaaaagaatctatcttcaagaaaggataaaattgatctcttgttcgaggagaacaactttaaacctttcaaatacaacgatttaggtgccttagcatacctgggatccgaaagggccattgcaaccatacgttccggtaagagaacattttacaccggtggtggcttaatgaccttctacttatggagaattatctacttgtccatgattctatctgcaagatcgagattaaaggtctttttcgactggattaaattagcatttttcaaaagagacttttttaaaggattatag

SEQ ID NO: 689 - DNA, 1542 bp, Artificial Sequence
  source: /note="Description of Artificial Sequence: Synthetic polynucleotide"
atgctatcgaagaatttgtatagtaacaagaggttgctcacctcgacgaatacgctagtcagattcgcttccaccagatccacaggggtggaaaactccggagcaggtcctacatcttttaagaccatgaaaatcattgaccctcagcacagcgacaaaccaaacgtgctgatactgggttcggggtggggagctatttcgtttttaaagcacattgacaccaagaagtacaacgtttccatcgtgtctcctagaagctatttcatctttacgcctttgttaccttctgcaccagttgggacagtagacgaaaagtcaattattgagcccatcgttaattttgctctcaagaaaaaggggaacgttacctactatgaggcagaagccacctctatcaatcccgacaggaataccgttaccataaaatcattatctgccgttagccagctataccaacctgaaaaccatctagggctgcatcaagcagaacctgctgaaattaagtacgattatttaatcagtgctgtaggtgcggaacctaacacatttggtattcctggggtcactgattacggtcatttcctgaaggaaattcccaactctttggaaataagaagaacttttgccgccaatctagagaaggctaacttattgccaaagggtgatcccgaaagaagaagactactgtccattgtcgtggttggtggtgggcctactggtgtagaggccgctggtgaactacaggattatgttcaccaggacctgagaaagtttctccctgcattggccgaagaagtccaaattcacttggtcgaagctctgcccatcgttttgaatatgtttgagaaaaagctttcatcatacgcgcaatcacatttagaaaacacttcgatcaaagtacatctgagaacggctgtcgccaaagttgaagaaaagcaattgttggcaaagacgaaacacgaagacggtaaaataaccgaagaaactattccatacggtactttgatttgggccacgggtaacaaggcaagaccggtaatcacagaccttttcaagaaaattcctgagcaaaactcgtccaagagaggattggcagtgaatgactttttgcaagtgaaaggcagcaacaacattttcgccattggtgacaatgcatttgctgggttgccaccaaccgcccaagtggcgcaccaagaggccgaatatttggccaagaattttgataaaatggctcaaataccaaatttccaaaagaatctatcttcaagaaaggataaaattgatctcttgttcgaggagaacaactttaaacctttcaaatacaacgatttaggtgccttagcatacctgggatccgaaagggccattgcaaccatacgttccggtaagagaacattttacaccggtggtggcttaatgaccttctacttatggagaattatctacatgtccatgattctatctgcaagatcgagattaaaggtctttttcgactggattaaattagcatttttcaaaagagacttttttaaaggattatag

SEQ ID NO: 690 - DNA, 1542 bp, Artificial Sequence
  source: /note="Description of Artificial Sequence: Synthetic polynucleotide"
atgctatcgaagaatttgtatagtaacaagaggttgctcacctcgacgaatacgctagtcagattcgcttccaccagatccacaggggtggaaaactccggagcaggtcctacatcttttaagaccatgaaaatcattgaccctcagcacagcgacaaaccaaacgtgctgatactgggttcggggtggggagctatttcgtttttaaagcacattgacaccaagaagtacaacgtttccatcgtgtctcctagaagctatttcttatttacgcctttgttaccttctgcaccagttgggacagtagacgaaaagtcaattattgagcccatcgttaattttgctctcaagaaaaaggggaacgttacctactatgaggcagaagccacctctatcaatcccgacaggaataccgttaccataaaatcattatctgccgttagccagctataccaacctgaaaaccatctagggctgcatcaagcagaacctgctgaaattaagtacgattatttaatcagtgctgtaggtgcggaacctaacacatttggtattcctggggtcactgattacggtcatttcctgaaggaaattcccaactctttggaaataagaagaacttttgccgccaatctagagaaggctaacttattgccaaagggtgatcccgaaagaagaagactactgtccattgtcgtggttggtggtgggcctactggtgtagaggccgctggtgaactacaggattatgttcaccaggacctgagaaagtttctccctgcattggccgaagaaatccaaattcacttggtcgaagctctgcccatcgttttgaatatgtttgagaaaaagctttcatcatacgcgcaatcacatttagaaaacacttcgatcaaagtacatctgagaacggctgtcgccaaagttgaagaaaagcaattgttggcaaagacgaaacacgaagacggtaaaataaccgaagaaactattccatacggtactttgatttgggccacgggtaacaaggcaagaccggtaatcacagaccttttcaagaaaattcctgagcaaaactcgtccaagagaggattggcagtgaatgactttttgcaagtgaaaggcagcaacaacattttcgccattggtgacaatgcatttgctgggttgccaccaaccgcccaagtggcgcaccaagaggccgaatatttggccaagaattttgataaaatggctcaaataccaaatttccaaaagaatctatcttcaagaaaggataaaattgatctcttgttcgaggagaacaactttaaacctttcaaatacaacgatttaggtgccttagcatacctgggatccgaaagggccattgcaaccatacgttccggtaagagaacattttacaccggtggtggcttaatgaccttctacttatggagaattatctacatgtccatgattctatctgcaagatcgagattaaaggtctttttcgactggattaaattagcatttttcaaaagagacttttttaaaggattatag

SEQ ID NO: 691 - DNA, 1542 bp, Artificial Sequence
  source: /note="Description of Artificial Sequence: Synthetic polynucleotide"
atgctatcgaagaatttgtatagtaacaagaggttgctcacctcgacgaatacgctagtcagattcgcttccaccagatccacaggggtggaaaactccggagcaggtcctacatcttttaagaccatgaaagtcattgaccctcagcacagcgacaaaccaaacgtgctgatactgggttcggggtggggagctatttcgtttttaaagcacattgacaccaagaagtacaacgtttccatcatctctcctagaagctatttcatctacacgcctttgttaccttctgcaccagttgggacagtagacgaaaagtcaattattgagcccatcgttaattttgctctcaagaaaaaggggaacgttacctactatgaggcagaagccacctctatcaatcccgacaggaataccgttaccataaaatcattatctgccgttagccagctataccaacctgaaaaccatctagggctgcatcaagcagaacctgctgaaattaagtacgattatttaatcagtgctgtaggtgcggaacctaacacatttggtattcctggggtcactgattacggtcatttcctgaaggaaattcccaactctttggaaataagaagaacttttgccgccaatctagagaaggctaacttattgccaaagggtgatcccgaaagaagaagactactgtccattgtcgtggttggtggtgggcctactggtgtagaggccgctggtgaactacaggattatgttcaccaggacctgagaaagtttctccctgcattggccgaagaaatccaaattcacttggtcgaagctctgcccatcgttttgaatatgtttgagaaaaagctttcatcatacgcgcaatcacatttagaaaacacttcgatcaaagtacatctgagaacggctgtcgccaaagttgaagaaaagcaattgttggcaaagacgaaacacgaagacggtaaaataaccgaagaaactattccatacggtactttgatttgggccacgggtaacaaggcaagaccggtaatcacagaccttttcaagaaaattcctgagcaaaactcgtccaagagaggattggcagtgaatgactttttgcaagtgaaaggcagcaacaacattttcgccattggtgacaatgcatttgctgggttgccaccaaccgcccaagtggcgcaccaagaggccgaatatttggccaagaattttgataaaatggctcaaataccaaatttccaaaagaatctatcttcaagaaaggataaaattgatctcttgttcgaggagaacaactttaaacctttcaaatacaacgatttaggtgccttagcatacctgggatccgaaagggccattgcaaccatacgttccggtaagagaacattttacaccggtggtggcttaatgaccttctacttatggagaattatctacatgtccatgattctatctgcaagatcgagattaaaggtctttttcgactggattaaattagcatttttcaaaagagacttttttaaaggattatag

SEQ ID NO: 692 - DNA, 1542 bp, Artificial Sequence
  source: /note="Description of Artificial Sequence: Synthetic polynucleotide"
atgctatcgaagaatttgtatagtaacaagaggttgctcacctcgacgaatacgctagtcagattcgcttccaccagatccacaggggtggaaaactccggagcaggtcctacatcttttaagaccatgaaaatcattgaccctcagcacagcgacaaaccaaacgtgctgatactgggttcggggtggggagctatttcgtttttaaagcacattgacaccaagaagtacaacgtttccatcatctctcctagaagctatttcatctacacgcctttgttaccttctgcaccagttgggacagtagacgaaaagtcaattattgagcccatcgttaattttgctctcaagaaaaaggggaacgttacctactatgaggcagaagccacctctatcaatcccgacaggaataccgttaccataaaatcattatctgccgttagccagctataccaacctgaaaaccatctagggctgcatcaagcagaacctgctgaaattaagtacgattatttaatcagtgctgtaggtgcggaacctaacacatttggtattcctggggtcactgattacggtcatttcctgaaggaaattcccaactctttggaaataagaagaacttttgccgccaatctagagaaggctaacttattgccaaagggtgatcccgaaagaagaagactactgtccattgtcgtggttggtggtgggcctactggtgtagaggccgctggtgaactacaggattatgttcaccaggacctgagaaagtttctccctgcattggccgaagaaatccaaattcacttggtcgaagctctgcccatcgttttgaatatgtttgagaaaaagctttcatcatacgcgcaatcacatttagaaaacacttcgatcaaagtacatctgagaacggctgtcgccaaagttgaagaaaagcaattgttggcaaagacgaaacacgaagacggtaaaataaccgaagaaactattccatacggtactttgatttgggccacgggtaacaaggcaagaccggtaatcacagaccttttcaagaaaattcctgagcaaaactcgtccaagagaggattggcagtgaatgactttttgcaagtgaaaggcagcaacaacattttcgccattggtgacaatgcatttgctgggttgccaccaaccgcccaagtggcgcaccaagaggccgaatatttggccaagaattttgataaaatggctcaaataccaaatttccaaaagaatctatcttcaagaaaggataaaattgatctcttgttcgaggagaacaactttaaacctttcaaatacaacgatttaggtgccttagcatacctgggatccgaaagggccattgcaaccatacgttccggtaagagaacattttacaccggtggtggcttaatgaccttctacttatggagaattttgtacatgtccatgattctatctgcaagatcgagattaaaggtctttttcgactggattaaattagcatttttcaaaagagacttttttaaaggattatag

SEQ ID NO: 693 - DNA, 1542 bp, Artificial Sequence
  source: /note="Description of Artificial Sequence: Synthetic polynucleotide"
atgctatcgaagaatttgtatagtaacaagaggttgctcacctcgacgaatacgctagtcagattcgcttccaccagatccacaggggtggaaaactccggagcaggtcctacatcttttaagaccatgaaaatcattgaccctcagcacagcgacaaaccaaacgtgctgatactgggttcggggtggggagctatttcgtttttaaagcacattgacaccaagaagtacaacgtttccatcatctctcctagaagctatttcatctacacgcctttgttaccttctgcaccagttgggacagtagacgaaaagtcaattattgagcccatcgttaattttgctctcaagaaaaaggggaacgttacctactatgaggcagaagccacctctatcaatcccgacaggaataccgttaccataaaatcattatctgccgttagccagctataccaacctgaaaaccatctagggctgcatcaagcagaacctgctgaaattaagtacgattatttaatcagtgctgtaggtgcggaacctaacacatttggtattcctggggtcactgattacggtcatttcctgaaggaaattcccaactctttggaaataagaagaacttttgccgccaatctagagaaggctaacttattgccaaagggtgatcccgaaagaagaagactactgtccattgtcgtggttggtggtgggcctactggtgtagaggccgctggtgaactacaggattatgttcaccaggacctgagaaagtttctccctgcattggccgaagaaatccaaattcacttggtcgaagctctgcccatcgttttgaatatgtttgagaaaaagctttcatcatacgcgcaatcacatttagaaaacacttcgatcaaagtacatctgagaacggctgtcgccaaagttgaagaaaagcaattgttggcaaagacgaaacacgaagacggtaaaataaccgaagaaactattccatacggtactttgatttgggccacgggtaacaaggcaagaccggtaatcacagaccttttcaagaaaattcctgagcaaaactcgtccaagagaggattggcagtgaatgactttttgcaagtgaaaggcagcaacaacattttcgccattggtgacaatgcatttgctgggttgccaccaaccgcccaagtggcgcaccaagaggccgaatatttggccaagaattttgataaaatggctcaaataccaaatttccaaaagaatctatcttcaagaaaggataaaattgatctcttgttcgaggagaacaactttaaacctttcaaatacaacgatttaggtgccttagcatacctgggatccgaaagggccattgcaaccatacgttccggtaagagaacattttacaccggtggtggcttaatgaccttctacttatggagaattatctacttgtccatgattctatctgcaagatcgagattaaaggtctttttcgactggattaaattagcatttttcaaaagagacttttttaaaggattatag

SEQ ID NO: 694 - DNA, 1542 bp, Artificial Sequence
  source: /note="Description of Artificial Sequence: Synthetic polynucleotide"
atgctatcgaagaatttgtatagtaacaagaggttgctcacctcgacgaatacgctagtcagattcgcttccaccagatccacaggggtggaaaactccggagcaggtcctacatcttttaagaccatgaaaatcattgaccctcagcacagcgacaaaccaaacgtgctgatactgggttcggggtggggagctatttcgtttttaaagcacattgacaccaagaagtacaacgtttccatcatctctcctagaagctatttcatctacacgcctttgttaccttctgcaccagttgggacagtagacgaaaagtcaattattgagcccatcgttaattttgctctcaagaaaaaggggaacgttacctactatgaggcagaagccacctctatcaatcccgacaggaataccgttaccataaaatcattatctgccgttagccagctataccaacctgaaaaccatctagggctgcatcaagcagaacctgctgaaattaagtacgattatttaatcagtgctgtaggtgcggaacctaacacatttggtattcctggggtcactgattacggtcatttcctgaaggaaattcccaactctttggaaataagaagaacttttgccgccaatctagagaaggctaacttattgccaaagggtgatcccgaaagaagaagactactgtccattgtcgtggttggtggtgggcctactggtgtagaggccgctggtgaactacaggattatgttcaccaggacctgagaaagtttctccctgcattggccgaagaagtccaaattcacttggtcgaagctctgcccatcgttttgaatatgtttgagaaaaagctttcatcatacgcgcaatcacatttagaaaacacttcgatcaaagtacatctgagaacggctgtcgccaaagttgaagaaaagcaattgttggcaaagacgaaacacgaagacggtaaaataaccgaagaaactattccatacggtactttgatttgggccacgggtaacaaggcaagaccggtaatcacagaccttttcaagaaaattcctgagcaaaactcgtccaagagaggattggcagtgaatgactttttgcaagtgaaaggcagcaacaacattttcgccattggtgacaatgcatttgctgggttgccaccaaccgcccaagtggcgcaccaagaggccgaatatttggccaagaattttgataaaatggctcaaataccaaatttccaaaagaatctatcttcaagaaaggataaaattgatctcttgttcgaggagaacaactttaaacctttcaaatacaacgatttaggtgccttagcatacctgggatccgaaagggccattgcaaccatacgttccggtaagagaacattttacaccggtggtggcttaatgaccttctacttatggagaattatctacatgtccatgattctatctgcaagatcgagattaaaggtctttttcgactggattaaattagcatttttcaaaagagacttttttaaaggattatag

SEQ ID NO: 695 - DNA, 1542 bp, Artificial Sequence
  source: /note="Description of Artificial Sequence: Synthetic polynucleotide"
atgctatcgaagaatttgtatagtaacaagaggttgctcacctcgacgaatacgctagtcagattcgcttccaccagatccacaggggtggaaaactccggagcaggtcctacatcttttaagaccatgaaaatcattgaccctcagcacagcgacaaaccaaacgtgctgatactgggttcggggtggggagctatttcgtttttaaagcacattgacaccaagaagtacaacgtttccatcatctctcctagaagctatttcttatacacgcctttgttaccttctgcaccagttgggacagtagacgaaaagtcaattattgagcccatcgttaattttgctctcaagaaaaaggggaacgttacctactatgaggcagaagccacctctatcaatcccgacaggaataccgttaccataaaatcattatctgccgttagccagctataccaacctgaaaaccatctagggctgcatcaagcagaacctgctgaaattaagtacgattatttaatcagtgctgtaggtgcggaacctaacacatttggtattcctggggtcactgattacggtcatttcctgaaggaaattcccaactctttggaaataagaagaacttttgccgccaatctagagaaggctaacttattgccaaagggtgatcccgaaagaagaagactactgtccattgtcgtggttggtggtgggcctactggtgtagaggccgctggtgaactacaggattatgttcaccaggacctgagaaagtttctccctgcattggccgaagaaatccaaattcacttggtcgaagctctgcccatcgttttgaatatgtttgagaaaaagctttcatcatacgcgcaatcacatttagaaaacacttcgatcaaagtacatctgagaacggctgtcgccaaagttgaagaaaagcaattgttggcaaagacgaaacacgaagacggtaaaataaccgaagaaactattccatacggtactttgatttgggccacgggtaacaaggcaagaccggtaatcacagaccttttcaagaaaattcctgagcaaaactcgtccaagagaggattggcagtgaatgactttttgcaagtgaaaggcagcaacaacattttcgccattggtgacaatgcatttgctgggttgccaccaaccgcccaagtggcgcaccaagaggccgaatatttggccaagaattttgataaaatggctcaaataccaaatttccaaaagaatctatcttcaagaaaggataaaattgatctcttgttcgaggagaacaactttaaacctttcaaatacaacgatttaggtgccttagcatacctgggatccgaaagggccattgcaaccatacgttccggtaagagaacattttacaccggtggtggcttaatgaccttctacttatggagaattatctacatgtccatgattctatctgcaagatcgagattaaaggtctttttcgactggattaaattagcatttttcaaaagagacttttttaaaggattatag

SEQ ID NO: 696 - DNA, 1542 bp, Artificial Sequence
  source: /note="Description of Artificial Sequence: Synthetic polynucleotide"
atgctatcgaagaatttgtatagtaacaagaggttgctcacctcgacgaatacgctagtcagattcgcttccaccagatccacaggggtggaaaactccggagcaggtcctacatcttttaagaccatgaaaatcattgaccctcagcacagcgacaaaccaaacgtgctgatactgggttcggggtggggagctatttcgtttttaaagcacattgacaccaagaagtacaacgtttccatcatctctcctagaagctatttcatctttacgcctttgttaccttctgcaccagttgggacagtagacgaaaagtcaattattgagcccatcgttaattttgctctcaagaaaaaggggaacgttacctactatgaggcagaagccacctctatcaatcccgacaggaataccgttaccataaaatcattatctgccgttagccagctataccaacctgaaaaccatctagggctgcatcaagcagaacctgctgaaattaagtacgattatttaatcagtgctgtaggtgcggaacctaacacatttggtattcctggggtcactgattacggtcatttcctgaaggaaattcccaactctttggaaataagaagaacttttgccgccaatctagagaaggctaacttattgccaaagggtgatcccgaaagaagaagactactgtccattgtcgtggttggtggtgggcctactggtgtagaggccgctggtgaactacaggattatgttcaccaggacctgagaaagtttctccctgcattggccgaagaaatccaaattcacttggtcgaagctctgcccatcgttttgaatatgtttgagaaaaagctttcatcatacgcgcaatcacatttagaaaacacttcgatcaaagtacatctgagaacggctgtcgccaaagttgaagaaaagcaattgttggcaaagacgaaacacgaagacggtaaaataaccgaagaaactattccatacggtactttgatttgggccacgggtaacaaggcaagaccggtaatcacagaccttttcaagaaaattcctgagcaaaactcgtccaagagaggattggcagtgaatgactttttgcaagtgaaaggcagcaacaacattttcgccattggtgacaatgcatttgctgggttgccaccaaccgcccaagtggcgcaccaagaggccgaatatttggccaagaattttgataaaatggctcaaataccaaatttccaaaagaatctatcttcaagaaaggataaaattgatctcttgttcgaggagaacaactttaaacctttcaaatacaacgatttaggtgccttagcatacctgggatccgaaagggccattgcaaccatacgttccggtaagagaacattttacaccggtggtggcttaatgaccttctacttatggagaattatctacatgtccatgattctatctgcaagatcgagattaaaggtctttttcgactggattaaattagcatttttcaaaagagacttttttaaaggattatag

SEQ ID NO: 697 - DNA, 1542 bp, Artificial Sequence
  source: /note="Description of Artificial Sequence: Synthetic polynucleotide"
atgctatcgaagaatttgtatagtaacaagaggttgctcacctcgacgaatacgctagtcagattcgcttccaccagatccacaggggtggaaaactccggagcaggtcctacatcttttaagaccatgaaagtcattgaccctcagcacagcgacaaaccaaacgtgctgatactgggttcggggtggggagctatttcgtttttaaagcacattgacaccaagaagtacaacgtttccatcgtgtctcctagaagctatttcatctacacgcctttgttaccttctgcaccagttgggacagtagacgaaaagtcaattattgagcccatcgttaattttgctctcaagaaaaaggggaacgttacctactatgaggcagaagccacctctatcaatcccgacaggaataccgttaccataaaatcattatctgccgttagccagctataccaacctgaaaaccatctagggctgcatcaagcagaacctgctgaaattaagtacgattatttaatcagtgctgtaggtgcggaacctaacacatttggtattcctggggtcactgattacggtcatttcctgaaggaaattcccaactctttggaaataagaagaacttttgccgccaatctagagaaggctaacttattgccaaagggtgatcccgaaagaagaagactactgtccattgtcgtggttggtggtgggcctactggtgtagaggccgctggtgaactacaggattatgttcaccaggacctgagaaagtttctccctgcattggccgaagaaatccaaattcacttggtcgaagctctgcccatcgttttgaatatgtttgagaaaaagctttcatcatacgcgcaatcacatttagaaaacacttcgatcaaagtacatctgagaacggctgtcgccaaagttgaagaaaagcaattgttggcaaagacgaaacacgaagacggtaaaataaccgaagaaactattccatacggtactttgatttgggccacgggtaacaaggcaagaccggtaatcacagaccttttcaagaaaattcctgagcaaaactcgtccaagagaggattggcagtgaatgactttttgcaagtgaaaggcagcaacaacattttcgccattggtgacaatgcatttgctgggttgccaccaaccgcccaagtggcgcaccaagaggccgaatatttggccaagaattttgataaaatggctcaaataccaaatttccaaaagaatctatcttcaagaaaggataaaattgatctcttgttcgaggagaacaactttaaacctttcaaatacaacgatttaggtgccttagcatacctgggatccgaaagggccattgcaaccatacgttccggtaagagaacattttacaccggtggtggcttaatgaccttctacttatggagaattatctacatgtccatgattctatctgcaagatcgagattaaaggtctttttcgactggattaaattagcatttttcaaaagagacttttttaaaggattatag

SEQ ID NO: 698 - DNA, 1542 bp, Artificial Sequence
  source: /note="Description of Artificial Sequence: Synthetic polynucleotide"
atgctatcgaagaatttgtatagtaacaagaggttgctcacctcgacgaatacgctagtcagattcgcttccaccagatccacaggggtggaaaactccggagcaggtcctacatcttttaagaccatgaaaatcattgaccctcagcacagcgacaaaccaaacgtgctgatactgggttcggggtggggagctatttcgtttttaaagcacattgacaccaagaagtacaacgtttccatcgtgtctcctagaagctatttcatctacacgcctttgttaccttctgcaccagttgggacagtagacgaaaagtcaattattgagcccatcgttaattttgctctcaagaaaaaggggaacgttacctactatgaggcagaagccacctctatcaatcccgacaggaataccgttaccataaaatcattatctgccgttagccagctataccaacctgaaaaccatctagggctgcatcaagcagaacctgctgaaattaagtacgattatttaatcagtgctgtaggtgcggaacctaacacatttggtattcctggggtcactgattacggtcatttcctgaaggaaattcccaactctttggaaataagaagaacttttgccgccaatctagagaaggctaacttattgccaaagggtgatcccgaaagaagaagactactgtccattgtcgtggttggtggtgggcctactggtgtagaggccgctggtgaactacaggattatgttcaccaggacctgagaaagtttctccctgcattggccgaagaaatccaaattcacttggtcgaagctctgcccatcgttttgaatatgtttgagaaaaagctttcatcatacgcgcaatcacatttagaaaacacttcgatcaaagtacatctgagaacggctgtcgccaaagttgaagaaaagcaattgttggcaaagacgaaacacgaagacggtaaaataaccgaagaaactattccatacggtactttgatttgggccacgggtaacaaggcaagaccggtaatcacagaccttttcaagaaaattcctgagcaaaactcgtccaagagaggattggcagtgaatgactttttgcaagtgaaaggcagcaacaacattttcgccattggtgacaatgcatttgctgggttgccaccaaccgcccaagtggcgcaccaagaggccgaatatttggccaagaattttgataaaatggctcaaataccaaatttccaaaagaatctatcttcaagaaaggataaaattgatctcttgttcgaggagaacaactttaaacctttcaaatacaacgatttaggtgccttagcatacctgggatccgaaagggccattgcaaccatacgttccggtaagagaacattttacaccggtggtggcttaatgaccttctacttatggagaattttgtacatgtccatgattctatctgcaagatcgagattaaaggtctttttcgactggattaaattagcatttttcaaaagagacttttttaaaggattatag

SEQ ID NO: 699 - DNA, 1542 bp, Artificial Sequence
  source: /note="Description of Artificial Sequence: Synthetic polynucleotide"
atgctatcgaagaatttgtatagtaacaagaggttgctcacctcgacgaatacgctagtcagattcgcttccaccagatccacaggggtggaaaactccggagcaggtcctacatcttttaagaccatgaaaatcattgaccctcagcacagcgacaaaccaaacgtgctgatactgggttcggggtggggagctatttcgtttttaaagcacattgacaccaagaagtacaacgtttccatcgtgtctcctagaagctatttcatctacacgcctttgttaccttctgcaccagttgggacagtagacgaaaagtcaattattgagcccatcgttaattttgctctcaagaaaaaggggaacgttacctactatgaggcagaagccacctctatcaatcccgacaggaataccgttaccataaaatcattatctgccgttagccagctataccaacctgaaaaccatctagggctgcatcaagcagaacctgctgaaattaagtacgattatttaatcagtgctgtaggtgcggaacctaacacatttggtattcctggggtcactgattacggtcatttcctgaaggaaattcccaactctttggaaataagaagaacttttgccgccaatctagagaaggctaacttattgccaaagggtgatcccgaaagaagaagactactgtccattgtcgtggttggtggtgggcctactggtgtagaggccgctggtgaactacaggattatgttcaccaggacctgagaaagtttctccctgcattggccgaagaaatccaaattcacttggtcgaagctctgcccatcgttttgaatatgtttgagaaaaagctttcatcatacgcgcaatcacatttagaaaacacttcgatcaaagtacatctgagaacggctgtcgccaaagttgaagaaaagcaattgttggcaaagacgaaacacgaagacggtaaaataaccgaagaaactattccatacggtactttgatttgggccacgggtaacaaggcaagaccggtaatcacagaccttttcaagaaaattcctgagcaaaactcgtccaagagaggattggcagtgaatgactttttgcaagtgaaaggcagcaacaacattttcgccattggtgacaatgcatttgctgggttgccaccaaccgcccaagtggcgcaccaagaggccgaatatttggccaagaattttgataaaatggctcaaataccaaatttccaaaagaatctatcttcaagaaaggataaaattgatctcttgttcgaggagaacaactttaaacctttcaaatacaacgatttaggtgccttagcatacctgggatccgaaagggccattgcaaccatacgttccggtaagagaacattttacaccggtggtggcttaatgaccttctacttatggagaattatctacttgtccatgattctatctgcaagatcgagattaaaggtctttttcgactggattaaattagcatttttcaaaagagacttttttaaaggattatag

SEQ ID NO: 700 - DNA, 1542 bp, Artificial Sequence
  source: /note="Description of Artificial Sequence: Synthetic polynucleotide"
atgctatcgaagaatttgtatagtaacaagaggttgctcacctcgacgaatacgctagtcagattcgcttccaccagatccacaggggtggaaaactccggagcaggtcctacatcttttaagaccatgaaaatcattgaccctcagcacagcgacaaaccaaacgtgctgatactgggttcggggtggggagctatttcgtttttaaagcacattgacaccaagaagtacaacgtttccatcgtgtctcctagaagctatttcatctacacgcctttgttaccttctgcaccagttgggacagtagacgaaaagtcaattattgagcccatcgttaattttgctctcaagaaaaaggggaacgttacctactatgaggcagaagccacctctatcaatcccgacaggaataccgttaccataaaatcattatctgccgttagccagctataccaacctgaaaaccatctagggctgcatcaagcagaacctgctgaaattaagtacgattatttaatcagtgctgtaggtgcggaacctaacacatttggtattcctggggtcactgattacggtcatttcctgaaggaaattcccaactctttggaaataagaagaacttttgccgccaatctagagaaggctaacttattgccaaagggtgatcccgaaagaagaagactactgtccattgtcgtggttggtggtgggcctactggtgtagaggccgctggtgaactacaggattatgttcaccaggacctgagaaagtttctccctgcattggccgaagaagtccaaattcacttggtcgaagctctgcccatcgttttgaatatgtttgagaaaaagctttcatcatacgcgcaatcacatttagaaaacacttcgatcaaagtacatctgagaacggctgtcgccaaagttgaagaaaagcaattgttggcaaagacgaaacacgaagacggtaaaataaccgaagaaactattccatacggtactttgatttgggccacgggtaacaaggcaagaccggtaatcacagaccttttcaagaaaattcctgagcaaaactcgtccaagagaggattggcagtgaatgactttttgcaagtgaaaggcagcaacaacattttcgccattggtgacaatgcatttgctgggttgccaccaaccgcccaagtggcgcaccaagaggccgaatatttggccaagaattttgataaaatggctcaaataccaaatttccaaaagaatctatcttcaagaaaggataaaattgatctcttgttcgaggagaacaactttaaacctttcaaatacaacgatttaggtgccttagcatacctgggatccgaaagggccattgcaaccatacgttccggtaagagaacattttacaccggtggtggcttaatgaccttctacttatggagaattatctacatgtccatgattctatctgcaagatcgagattaaaggtctttttcgactggattaaattagcatttttcaaaagagacttttttaaaggattatag

SEQ ID NO: 701 - DNA, 1542 bp, Artificial Sequence
  source: /note="Description of Artificial Sequence: Synthetic polynucleotide"
atgctatcgaagaatttgtatagtaacaagaggttgctcacctcgacgaatacgctagtcagattcgcttccaccagatccacaggggtggaaaactccggagcaggtcctacatcttttaagaccatgaaaatcattgaccctcagcacagcgacaaaccaaacgtgctgatactgggttcggggtggggagctatttcgtttttaaagcacattgacaccaagaagtacaacgtttccatcgtgtctcctagaagctatttcttatacacgcctttgttaccttctgcaccagttgggacagtagacgaaaagtcaattattgagcccatcgttaattttgctctcaagaaaaaggggaacgttacctactatgaggcagaagccacctctatcaatcccgacaggaataccgttaccataaaatcattatctgccgttagccagctataccaacctgaaaaccatctagggctgcatcaagcagaacctgctgaaattaagtacgattatttaatcagtgctgtaggtgcggaacctaacacatttggtattcctggggtcactgattacggtcatttcctgaaggaaattcccaactctttggaaataagaagaacttttgccgccaatctagagaaggctaacttattgccaaagggtgatcccgaaagaagaagactactgtccattgtcgtggttggtggtgggcctactggtgtagaggccgctggtgaactacaggattatgttcaccaggacctgagaaagtttctccctgcattggccgaagaaatccaaattcacttggtcgaagctctgcccatcgttttgaatatgtttgagaaaaagctttcatcatacgcgcaatcacatttagaaaacacttcgatcaaagtacatctgagaacggctgtcgccaaagttgaagaaaagcaattgttggcaaagacgaaacacgaagacggtaaaataaccgaagaaactattccatacggtactttgatttgggccacgggtaacaaggcaagaccggtaatcacagaccttttcaagaaaattcctgagcaaaactcgtccaagagaggattggcagtgaatgactttttgcaagtgaaaggcagcaacaacattttcgccattggtgacaatgcatttgctgggttgccaccaaccgcccaagtggcgcaccaagaggccgaatatttggccaagaattttgataaaatggctcaaataccaaatttccaaaagaatctatcttcaagaaaggataaaattgatctcttgttcgaggagaacaactttaaacctttcaaatacaacgatttaggtgccttagcatacctgggatccgaaagggccattgcaaccatacgttccggtaagagaacattttacaccggtggtggcttaatgaccttctacttatggagaattatctacatgtccatgattctatctgcaagatcgagattaaaggtctttttcgactggattaaattagcatttttcaaaagagacttttttaaaggattatag

SEQ ID NO: 702 - DNA, 1542 bp, Artificial Sequence
  source: /note="Description of Artificial Sequence: Synthetic polynucleotide"
atgctatcgaagaatttgtatagtaacaagaggttgctcacctcgacgaatacgctagtcagattcgcttccaccagatccacaggggtggaaaactccggagcaggtcctacatcttttaagaccatgaaaatcattgaccctcagcacagcgacaaaccaaacgtgctgatactgggttcggggtggggagctatttcgtttttaaagcacattgacaccaagaagtacaacgtttccatcgtgtctcctagaagctatttcatctttacgcctttgttaccttctgcaccagttgggacagtagacgaaaagtcaattattgagcccatcgttaattttgctctcaagaaaaaggggaacgttacctactatgaggcagaagccacctctatcaatcccgacaggaataccgttaccataaaatcattatctgccgttagccagctataccaacctgaaaaccatctagggctgcatcaagcagaacctgctgaaattaagtacgattatttaatcagtgctgtaggtgcggaacctaacacatttggtattcctggggtcactgattacggtcatttcctgaaggaaattcccaactctttggaaataagaagaacttttgccgccaatctagagaaggctaacttattgccaaagggtgatcccgaaagaagaagactactgtccattgtcgtggttggtggtgggcctactggtgtagaggccgctggtgaactacaggattatgttcaccaggacctgagaaagtttctccctgcattggccgaagaaatccaaattcacttggtcgaagctctgcccatcgttttgaatatgtttgagaaaaagctttcatcatacgcgcaatcacatttagaaaacacttcgatcaaagtacatctgagaacggctgtcgccaaagttgaagaaaagcaattgttggcaaagacgaaacacgaagacggtaaaataaccgaagaaactattccatacggtactttgatttgggccacgggtaacaaggcaagaccggtaatcacagaccttttcaagaaaattcctgagcaaaactcgtccaagagaggattggcagtgaatgactttttgcaagtgaaaggcagcaacaacattttcgccattggtgacaatgcatttgctgggttgccaccaaccgcccaagtggcgcaccaagaggccgaatatttggccaagaattttgataaaatggctcaaataccaaatttccaaaagaatctatcttcaagaaaggataaaattgatctcttgttcgaggagaacaactttaaacctttcaaatacaacgatttaggtgccttagcatacctgggatccgaaagggccattgcaaccatacgttccggtaagagaacattttacaccggtggtggcttaatgaccttctacttatggagaattatctacatgtccatgattctatctgcaagatcgagattaaaggtctttttcgactggattaaattagcatttttcaaaagagacttttttaaaggattatag

SEQ ID NO: 703 - DNA, 1542 bp, Artificial Sequence
  source: /note="Description of Artificial Sequence: Synthetic polynucleotide"
atgctatcgaagaatttgtatagtaacaagaggttgctcacctcgacgaatacgctagtcagattcgcttccaccagatccacaggggtggaaaactccggagcaggtcctacatcttttaagaccatgaaaatcattgaccctcagcacagcgacaaaccaaacgtgctgatactgggttcggggtggggagctatttcgtttttaaagcacattgacaccaagaagtacaacgtttccatcatctctcctagaagctatttcatctacacgcctttgttaccttctgcaccagttgggacagtagacgaaaagtcaattattgagcccatcgttaattttgctctcaagaaaaaggggaacgttacctactatgaggcagaagccacctctatcaatcccgacaggaataccgttaccataaaatcattatctgccgttagccagctataccaacctgaaaaccatctagggctgcatcaagcagaacctgctgaaattaagtacgattatttaatcagtgctgtaggtgcggaacctaacacatttggtattcctggggtcactgattacggtcatttcctgaaggaaattcccaactctttggaaataagaagaacttttgccgccaatctagagaaggctaacttattgccaaagggtgatcccgaaagaagaagactactgtccattgtcgtggttggtggtgggcctactggtgtagaggccgctggtgaactacaggattatgttcaccaggacctgagaaagtttctccctgcattggccgaagaaatccaaattcacttggtcgaagctctgcccatcgttttgaatatgtttgagaaaaagctttcatcatacgcgcaatcacatttagaaaacacttcgatcaaagtacatctgagaacggctgtcgccaaagttgaagaaaagcaattgttggcaaagacgaaacacgaagacggtaaaataaccgaagaaactattccatacggtactttgatttgggccacgggtaacaaggcaagaccggtaatcacagaccttttcaagaaaattcctgagcaaaactcgtccaagagaggattggcagtgaatgactttttgcaagtgaaaggcagcaacaacattttcgccattggtgacaatgcatttgctgggttgccaccaaccgcccaagtggcgcaccaagaggccgaatatttggccaagaattttgataaaatggctcaaataccaaatttccaaaagaatctatcttcaagaaaggataaaattgatctcttgttcgaggagaacaactttaaacctttcaaatacaacgatttaggtgccttagcatacctgggatccgaaagggccattgcaaccatacgttccggtaagagaacattttacaccggtggtggcttaatgaccttctacttatggagaattatctacatgtccatgattctatctgcaagatcgagattaaaggtctttttcgactggattaaattagcatttttcaaaagagacttttttaaaggattatag

SEQ ID NO: 704 - DNA, 1542 bp, Artificial Sequence
  source: /note="Description of Artificial Sequence: Synthetic polynucleotide"
atgctatcgaagaatttgtatagtaacaagaggttgctcacctcgacgaatacgctagtcagattcgcttccaccagatccacaggggtggaaaactccggagcaggtcctacatcttttaagaccatgaaaatcattgaccctcagcacagcgacaaaccaaacgtgctgatactgggttcggggtggggagctatttcgtttttaaagcacattgacaccaagaagtacaacgtttccatcgtgtctcctagaagctatttcatctacacgcctttgttaccttctgcaccagttgggacagtagacgaaaagtcaattattgagcccatcgttaattttgctctcaagaaaaaggggaacgttacctactatgaggcagaagccacctctatcaatcccgacaggaataccgttaccataaaatcattatctgccgttagccagctataccaacctgaaaaccatctagggctgcatcaagcagaacctgctgaaattaagtacgattatttaatcagtgctgtaggtgcggaacctaacacatttggtattcctggggtcactgattacggtcatttcctgaaggaaattcccaactctttggaaataagaagaacttttgccgccaatctagagaaggctaacttattgccaaagggtgatcccgaaagaagaagactactgtccattgtcgtggttggtggtgggcctactggtgtagaggccgctggtgaactacaggattatgttcaccaggacctgagaaagtttctccctgcattggccgaagaaatccaaattcacttggtcgaagctctgcccatcgttttgaatatgtttgagaaaaagctttcatcatacgcgcaatcacatttagaaaacacttcgatcaaagtacatctgagaacggctgtcgccaaagttgaagaaaagcaattgttggcaaagacgaaacacgaagacggtaaaataaccgaagaaactattccatacggtactttgatttgggccacgggtaacaaggcaagaccggtaatcacagaccttttcaagaaaattcctgagcaaaactcgtccaagagaggattggcagtgaatgactttttgcaagtgaaaggcagcaacaacattttcgccattggtgacaatgcatttgctgggttgccaccaaccgcccaagtggcgcaccaagaggccgaatatttggccaagaattttgataaaatggctcaaataccaaatttccaaaagaatctatcttcaagaaaggataaaattgatctcttgttcgaggagaacaactttaaacctttcaaatacaacgatttaggtgccttagcatacctgggatccgaaagggccattgcaaccatacgttccggtaagagaacattttacaccggtggtggcttaatgaccttctacttatggagaattatctacatgtccatgattctatctgcaagatcgagattaaaggtctttttcgactggattaaattagcatttttcaaaagagacttttttaaaggattatag

SEQ ID NO: 705 - DNA, 1542 bp, Artificial Sequence
  source: /note="Description of Artificial Sequence: Synthetic polynucleotide"
atgctgagcaagaacctgtacagcaacaagcggctgctgaccagcaccaacaccctcgtgcgcttcgccagcaccagatccaccggcgtcgaaaacagcggggctggccccaccagcttcaagaccatgaaggtcatcgacccccagcacagcgacaagcccaacgtgctgatcctgggctctggctggggcgccatcagctttctgaagcacatcgacaccaagaagtacaacgtcagcatcgtgagccccagaagctacttcctgtacacccccctgctgcccagcgcccctgtgggaaccgtggacgagaagtccatcatcgagcccatcgtgaacttcgccctgaagaaaaagggcaacgtcacctactacgaggccgaggccaccagcatcaaccccgaccggaacaccgtgaccatcaagagcctgagcgccgtgtcccagctgtaccagcccgagaaccacctgggcctgcaccaggccgagcccgccgagattaagtacgactacctgatcagcgccgtgggcgccgagcccaacacctttggaatccccggcgtgaccgactacggccacttcctgaaagagatccccaacagcctggaaatccggcggaccttcgccgccaacctggaaaaggccaacctgctgcctaagggcgaccccgagcggagaaggctgctgagcatcgtggtcgtgggcggaggccccacaggcgtggaagctgctggcgagctgcaggactacgtgcaccaggacctgcggaagttcctgcccgccctggccgaggaagtgcagattcacctggtggaagccctgcccatcgtgctgaacatgttcgagaagaagctgagcagctacgcccagagccacctggaaaacacctccatcaaggtgcacctgagaaccgccgtggccaaggtggaagagaagcagctgctggccaagaccaagcacgaggacggcaagattaccgaggaaaccatcccctacggcaccctgatttgggccaccggcaacaaggccagacccgtgatcaccgacctgttcaagaagatccccgagcagaacagcagcaagcggggcctggccgtgaacgacttcctgcaggtcaaaggcagcaacaacatcttcgccatcggcgacaacgcctttgccggcctgcctcctacagcccaggtggcccaccaggaagccgagtacctggccaagaacttcgacaagatggcccagatccccaatttccagaagaacctgtcctcccggaaggataagatcgacctgctgttcgaggaaaacaacttcaagcccttcaagtacaacgacctgggcgccctggcctacctgggcagcgaaagagccattgccaccatcagaagcggcaagcggaccttctacaccggcggaggcctgatgaccttctacctgtggcggatcctgtacctgagcatgatcctgagcgcccgcagcagactgaaggtgttcttcgactggatcaagctggccttcttcaagagggacttcttcaagggcctgtga

SEQ ID NO: 706 - DNA, 1542 bp, Artificial Sequence
  source: /note="Description of Artificial Sequence: Synthetic polynucleotide"
atgctgagcaagaacctgtacagcaacaagcggctgctgaccagcaccaacaccctcgtgcgcttcgccagcaccagatccaccggcgtcgaaaacagcggggctggccccaccagcttcaagaccatgaaggtcatcgacccccagcacagcgacaagcccaacgtgctgatcctgggctctggctggggcgccatcagctttctgaagcacatcgacaccaagaagtacaacgtcagcatcgtgagccccagaagctacttcatcttcacccccctgctgcccagcgcccctgtgggaaccgtggacgagaagtccatcatcgagcccatcgtgaacttcgccctgaagaaaaagggcaacgtcacctactacgaggccgaggccaccagcatcaaccccgaccggaacaccgtgaccatcaagagcctgagcgccgtgtcccagctgtaccagcccgagaaccacctgggcctgcaccaggccgagcccgccgagattaagtacgactacctgatcagcgccgtgggcgccgagcccaacacctttggaatccccggcgtgaccgactacggccacttcctgaaagagatccccaacagcctggaaatccggcggaccttcgccgccaacctggaaaaggccaacctgctgcctaagggcgaccccgagcggagaaggctgctgagcatcgtggtcgtgggcggaggccccacaggcgtggaagctgctggcgagctgcaggactacgtgcaccaggacctgcggaagttcctgcccgccctggccgaggaagtgcagattcacctggtggaagccctgcccatcgtgctgaacatgttcgagaagaagctgagcagctacgcccagagccacctggaaaacacctccatcaaggtgcacctgagaaccgccgtggccaaggtggaagagaagcagctgctggccaagaccaagcacgaggacggcaagattaccgaggaaaccatcccctacggcaccctgatttgggccaccggcaacaaggccagacccgtgatcaccgacctgttcaagaagatccccgagcagaacagcagcaagcggggcctggccgtgaacgacttcctgcaggtcaaaggcagcaacaacatcttcgccatcggcgacaacgcctttgccggcctgcctcctacagcccaggtggcccaccaggaagccgagtacctggccaagaacttcgacaagatggcccagatccccaatttccagaagaacctgtcctcccggaaggataagatcgacctgctgttcgaggaaaacaacttcaagcccttcaagtacaacgacctgggcgccctggcctacctgggcagcgaaagagccattgccaccatcagaagcggcaagcggaccttctacaccggcggaggcctgatgaccttctacctgtggcggatcctgtacctgagcatgatcctgagcgcccgcagcagactgaaggtgttcttcgactggatcaagctggccttcttcaagagggacttcttcaagggcctgtga

SEQ ID NO: 707 - DNA, 1542 bp, Artificial Sequence
  source: /note="Description of Artificial Sequence: Synthetic polynucleotide"
atgctgagcaagaacctgtacagcaacaagcggctgctgaccagcaccaacaccctcgtgcgcttcgccagcaccagatccaccggcgtcgaaaacagcggggctggccccaccagcttcaagaccatgaaggtcatcgacccccagcacagcgacaagcccaacgtgctgatcctgggctctggctggggcgccatcagctttctgaagcacatcgacaccaagaagtacaacgtcagcatcgtgagccccagaagctacttcctgttcacccccctgctgcccagcgcccctgtgggaaccgtggacgagaagtccatcatcgagcccatcgtgaacttcgccctgaagaaaaagggcaacgtcacctactacgaggccgaggccaccagcatcaaccccgaccggaacaccgtgaccatcaagagcctgagcgccgtgtcccagctgtaccagcccgagaaccacctgggcctgcaccaggccgagcccgccgagattaagtacgactacctgatcagcgccgtgggcgccgagcccaacacctttggaatccccggcgtgaccgactacggccacttcctgaaagagatccccaacagcctggaaatccggcggaccttcgccgccaacctggaaaaggccaacctgctgcctaagggcgaccccgagcggagaaggctgctgagcatcgtggtcgtgggcggaggccccacaggcgtggaagctgctggcgagctgcaggactacgtgcaccaggacctgcggaagttcctgcccgccctggccgaggaaatccagattcacctggtggaagccctgcccatcgtgctgaacatgttcgagaagaagctgagcagctacgcccagagccacctggaaaacacctccatcaaggtgcacctgagaaccgccgtggccaaggtggaagagaagcagctgctggccaagaccaagcacgaggacggcaagattaccgaggaaaccatcccctacggcaccctgatttgggccaccggcaacaaggccagacccgtgatcaccgacctgttcaagaagatccccgagcagaacagcagcaagcggggcctggccgtgaacgacttcctgcaggtcaaaggcagcaacaacatcttcgccatcggcgacaacgcctttgccggcctgcctcctacagcccaggtggcccaccaggaagccgagtacctggccaagaacttcgacaagatggcccagatccccaatttccagaagaacctgtcctcccggaaggataagatcgacctgctgttcgaggaaaacaacttcaagcccttcaagtacaacgacctgggcgccctggcctacctgggcagcgaaagagccattgccaccatcagaagcggcaagcggaccttctacaccggcggaggcctgatgaccttctacctgtggcggatcctgtacctgagcatgatcctgagcgcccgcagcagactgaaggtgttcttcgactggatcaagctggccttcttcaagagggacttcttcaagggcctgtga

SEQ ID NO: 708 - DNA, 1542 bp, Artificial Sequence
  source: /note="Description of Artificial Sequence: Synthetic polynucleotide"
atgctgagcaagaacctgtacagcaacaagcggctgctgaccagcaccaacaccctcgtgcgcttcgccagcaccagatccaccggcgtcgaaaacagcggggctggccccaccagcttcaagaccatgaaggtcatcgacccccagcacagcgacaagcccaacgtgctgatcctgggctctggctggggcgccatcagctttctgaagcacatcgacaccaagaagtacaacgtcagcatcgtgagccccagaagctacttcctgttcacccccctgctgcccagcgcccctgtgggaaccgtggacgagaagtccatcatcgagcccatcgtgaacttcgccctgaagaaaaagggcaacgtcacctactacgaggccgaggccaccagcatcaaccccgaccggaacaccgtgaccatcaagagcctgagcgccgtgtcccagctgtaccagcccgagaaccacctgggcctgcaccaggccgagcccgccgagattaagtacgactacctgatcagcgccgtgggcgccgagcccaacacctttggaatccccggcgtgaccgactacggccacttcctgaaagagatccccaacagcctggaaatccggcggaccttcgccgccaacctggaaaaggccaacctgctgcctaagggcgaccccgagcggagaaggctgctgagcatcgtggtcgtgggcggaggccccacaggcgtggaagctgctggcgagctgcaggactacgtgcaccaggacctgcggaagttcctgcccgccctggccgaggaagtgcagattcacctggtggaagccctgcccatcgtgctgaacatgttcgagaagaagctgagcagctacgcccagagccacctggaaaacacctccatcaaggtgcacctgagaaccgccgtggccaaggtggaagagaagcagctgctggccaagaccaagcacgaggacggcaagattaccgaggaaaccatcccctacggcaccctgatttgggccaccggcaacaaggccagacccgtgatcaccgacctgttcaagaagatccccgagcagaacagcagcaagcggggcctggccgtgaacgacttcctgcaggtcaaaggcagcaacaacatcttcgccatcggcgacaacgcctttgccggcctgcctcctacagcccaggtggcccaccaggaagccgagtacctggccaagaacttcgacaagatggcccagatccccaatttccagaagaacctgtcctcccggaaggataagatcgacctgctgttcgaggaaaacaacttcaagcccttcaagtacaacgacctgggcgccctggcctacctgggcagcgaaagagccattgccaccatcagaagcggcaagcggaccttctacaccggcggaggcctgatgaccttctacctgtggcggatcctgtacatgagcatgatcctgagcgcccgcagcagactgaaggtgttcttcgactggatcaagctggccttcttcaagagggacttcttcaagggcctgtga

SEQ ID NO: 709 - DNA, 1542 bp, Artificial Sequence
  source: /note="Description of Artificial Sequence: Synthetic polynucleotide"
atgctgagcaagaacctgtacagcaacaagcggctgctgaccagcaccaacaccctcgtgcgcttcgccagcaccagatccaccggcgtcgaaaacagcggggctggccccaccagcttcaagaccatgaaggtcatcgacccccagcacagcgacaagcccaacgtgctgatcctgggctctggctggggcgccatcagctttctgaagcacatcgacaccaagaagtacaacgtcagcatcgtgagccccagaagctacttcctgttcacccccctgctgcccagcgcccctgtgggaaccgtggacgagaagtccatcatcgagcccatcgtgaacttcgccctgaagaaaaagggcaacgtcacctactacgaggccgaggccaccagcatcaaccccgaccggaacaccgtgaccatcaagagcctgagcgccgtgtcccagctgtaccagcccgagaaccacctgggcctgcaccaggccgagcccgccgagattaagtacgactacctgatcagcgccgtgggcgccgagcccaacacctttggaatccccggcgtgaccgactacggccacttcctgaaagagatccccaacagcctggaaatccggcggaccttcgccgccaacctggaaaaggccaacctgctgcctaagggcgaccccgagcggagaaggctgctgagcatcgtggtcgtgggcggaggccccacaggcgtggaagctgctggcgagctgcaggactacgtgcaccaggacctgcggaagttcctgcccgccctggccgaggaagtgcagattcacctggtggaagccctgcccatcgtgctgaacatgttcgagaagaagctgagcagctacgcccagagccacctggaaaacacctccatcaaggtgcacctgagaaccgccgtggccaaggtggaagagaagcagctgctggccaagaccaagcacgaggacggcaagattaccgaggaaaccatcccctacggcaccctgatttgggccaccggcaacaaggccagacccgtgatcaccgacctgttcaagaagatccccgagcagaacagcagcaagcggggcctggccgtgaacgacttcctgcaggtcaaaggcagcaacaacatcttcgccatcggcgacaacgcctttgccggcctgcctcctacagcccaggtggcccaccaggaagccgagtacctggccaagaacttcgacaagatggcccagatccccaatttccagaagaacctgtcctcccggaaggataagatcgacctgctgttcgaggaaaacaacttcaagcccttcaagtacaacgacctgggcgccctggcctacctgggcagcgaaagagccattgccaccatcagaagcggcaagcggaccttctacaccggcggaggcctgatgaccttctacctgtggcggatcatctacctgagcatgatcctgagcgcccgcagcagactgaaggtgttcttcgactggatcaagctggccttcttcaagagggacttcttcaagggcctgtga

SEQ ID NO: 710 - DNA, 1542 bp, Artificial Sequence
  source: /note="Description of Artificial Sequence: Synthetic polynucleotide"
atgctgagcaagaacctgtacagcaacaagcggctgctgaccagcaccaacaccctcgtgcgcttcgccagcaccagatccaccggcgtcgaaaacagcggggctggccccaccagcttcaagaccatgaagatcatcgacccccagcacagcgacaagcccaacgtgctgatcctgggctctggctggggcgccatcagctttctgaagcacatcgacaccaagaagtacaacgtcagcatcgtgagccccagaagctacttcctgttcacccccctgctgcccagcgcccctgtgggaaccgtggacgagaagtccatcatcgagcccatcgtgaacttcgccctgaagaaaaagggcaacgtcacctactacgaggccgaggccaccagcatcaaccccgaccggaacaccgtgaccatcaagagcctgagcgccgtgtcccagctgtaccagcccgagaaccacctgggcctgcaccaggccgagcccgccgagattaagtacgactacctgatcagcgccgtgggcgccgagcccaacacctttggaatccccggcgtgaccgactacggccacttcctgaaagagatccccaacagcctggaaatccggcggaccttcgccgccaacctggaaaaggccaacctgctgcctaagggcgaccccgagcggagaaggctgctgagcatcgtggtcgtgggcggaggccccacaggcgtggaagctgctggcgagctgcaggactacgtgcaccaggacctgcggaagttcctgcccgccctggccgaggaagtgcagattcacctggtggaagccctgcccatcgtgctgaacatgttcgagaagaagctgagcagctacgcccagagccacctggaaaacacctccatcaaggtgcacctgagaaccgccgtggccaaggtggaagagaagcagctgctggccaagaccaagcacgaggacggcaagattaccgaggaaaccatcccctacggcaccctgatttgggccaccggcaacaaggccagacccgtgatcaccgacctgttcaagaagatccccgagcagaacagcagcaagcggggcctggccgtgaacgacttcctgcaggtcaaaggcagcaacaacatcttcgccatcggcgacaacgcctttgccggcctgcctcctacagcccaggtggcccaccaggaagccgagtacctggccaagaacttcgacaagatggcccagatccccaatttccagaagaacctgtcctcccggaaggataagatcgacctgctgttcgaggaaaacaacttcaagcccttcaagtacaacgacctgggcgccctggcctacctgggcagcgaaagagccattgccaccatcagaagcggcaagcggaccttctacaccggcggaggcctgatgaccttctacctgtggcggatcctgtacctgagcatgatcctgagcgcccgcagcagactgaaggtgttcttcgactggatcaagctggccttcttcaagagggacttcttcaagggcctgtga

SEQ ID NO: 711 - DNA, 1542 bp, Artificial Sequence
  source: /note="Description of Artificial Sequence: Synthetic polynucleotide"
atgctgagcaagaacctgtacagcaacaagcggctgctgaccagcaccaacaccctcgtgcgcttcgccagcaccagatccaccggcgtcgaaaacagcggggctggccccaccagcttcaagaccatgaaggtcatcgacccccagcacagcgacaagcccaacgtgctgatcctgggctctggctggggcgccatcagctttctgaagcacatcgacaccaagaagtacaacgtcagcatcatcagccccagaagctacttcatctacacccccctgctgcccagcgcccctgtgggaaccgtggacgagaagtccatcatcgagcccatcgtgaacttcgccctgaagaaaaagggcaacgtcacctactacgaggccgaggccaccagcatcaaccccgaccggaacaccgtgaccatcaagagcctgagcgccgtgtcccagctgtaccagcccgagaaccacctgggcctgcaccaggccgagcccgccgagattaagtacgactacctgatcagcgccgtgggcgccgagcccaacacctttggaatccccggcgtgaccgactacggccacttcctgaaagagatccccaacagcctggaaatccggcggaccttcgccgccaacctggaaaaggccaacctgctgcctaagggcgaccccgagcggagaaggctgctgagcatcgtggtcgtgggcggaggccccacaggcgtggaagctgctggcgagctgcaggactacgtgcaccaggacctgcggaagttcctgcccgccctggccgaggaagtgcagattcacctggtggaagccctgcccatcgtgctgaacatgttcgagaagaagctgagcagctacgcccagagccacctggaaaacacctccatcaaggtgcacctgagaaccgccgtggccaaggtggaagagaagcagctgctggccaagaccaagcacgaggacggcaagattaccgaggaaaccatcccctacggcaccctgatttgggccaccggcaacaaggccagacccgtgatcaccgacctgttcaagaagatccccgagcagaacagcagcaagcggggcctggccgtgaacgacttcctgcaggtcaaaggcagcaacaacatcttcgccatcggcgacaacgcctttgccggcctgcctcctacagcccaggtggcccaccaggaagccgagtacctggccaagaacttcgacaagatggcccagatccccaatttccagaagaacctgtcctcccggaaggataagatcgacctgctgttcgaggaaaacaacttcaagcccttcaagtacaacgacctgggcgccctggcctacctgggcagcgaaagagccattgccaccatcagaagcggcaagcggaccttctacaccggcggaggcctgatgaccttctacctgtggcggatcctgtacctgagcatgatcctgagcgcccgcagcagactgaaggtgttcttcgactggatcaagctggccttcttcaagagggacttcttcaagggcctgtga

SEQ ID NO: 712 - DNA, 1542 bp, Artificial Sequence
  source: /note="Description of Artificial Sequence: Synthetic polynucleotide"
atgctgagcaagaacctgtacagcaacaagcggctgctgaccagcaccaacaccctcgtgcgcttcgccagcaccagatccaccggcgtcgaaaacagcggggctggccccaccagcttcaagaccatgaaggtcatcgacccccagcacagcgacaagcccaacgtgctgatcctgggctctggctggggcgccatcagctttctgaagcacatcgacaccaagaagtacaacgtcagcatcatcagccccagaagctacttcctgtacacccccctgctgcccagcgcccctgtgggaaccgtggacgagaagtccatcatcgagcccatcgtgaacttcgccctgaagaaaaagggcaacgtcacctactacgaggccgaggccaccagcatcaaccccgaccggaacaccgtgaccatcaagagcctgagcgccgtgtcccagctgtaccagcccgagaaccacctgggcctgcaccaggccgagcccgccgagattaagtacgactacctgatcagcgccgtgggcgccgagcccaacacctttggaatccccggcgtgaccgactacggccacttcctgaaagagatccccaacagcctggaaatccggcggaccttcgccgccaacctggaaaaggccaacctgctgcctaagggcgaccccgagcggagaaggctgctgagcatcgtggtcgtgggcggaggccccacaggcgtggaagctgctggcgagctgcaggactacgtgcaccaggacctgcggaagttcctgcccgccctggccgaggaaatccagattcacctggtggaagccctgcccatcgtgctgaacatgttcgagaagaagctgagcagctacgcccagagccacctggaaaacacctccatcaaggtgcacctgagaaccgccgtggccaaggtggaagagaagcagctgctggccaagaccaagcacgaggacggcaagattaccgaggaaaccatcccctacggcaccctgatttgggccaccggcaacaaggccagacccgtgatcaccgacctgttcaagaagatccccgagcagaacagcagcaagcggggcctggccgtgaacgacttcctgcaggtcaaaggcagcaacaacatcttcgccatcggcgacaacgcctttgccggcctgcctcctacagcccaggtggcccaccaggaagccgagtacctggccaagaacttcgacaagatggcccagatccccaatttccagaagaacctgtcctcccggaaggataagatcgacctgctgttcgaggaaaacaacttcaagcccttcaagtacaacgacctgggcgccctggcctacctgggcagcgaaagagccattgccaccatcagaagcggcaagcggaccttctacaccggcggaggcctgatgaccttctacctgtggcggatcctgtacctgagcatgatcctgagcgcccgcagcagactgaaggtgttcttcgactggatcaagctggccttcttcaagagggacttcttcaagggcctgtga

SEQ ID NO: 713 - DNA, 1542 bp, Artificial Sequence
  source: /note="Description of Artificial Sequence: Synthetic polynucleotide"
atgctgagcaagaacctgtacagcaacaagcggctgctgaccagcaccaacaccctcgtgcgcttcgccagcaccagatccaccggcgtcgaaaacagcggggctggccccaccagcttcaagaccatgaaggtcatcgacccccagcacagcgacaagcccaacgtgctgatcctgggctctggctggggcgccatcagctttctgaagcacatcgacaccaagaagtacaacgtcagcatcatcagccccagaagctacttcctgtacacccccctgctgcccagcgcccctgtgggaaccgtggacgagaagtccatcatcgagcccatcgtgaacttcgccctgaagaaaaagggcaacgtcacctactacgaggccgaggccaccagcatcaaccccgaccggaacaccgtgaccatcaagagcctgagcgccgtgtcccagctgtaccagcccgagaaccacctgggcctgcaccaggccgagcccgccgagattaagtacgactacctgatcagcgccgtgggcgccgagcccaacacctttggaatccccggcgtgaccgactacggccacttcctgaaagagatccccaacagcctggaaatccggcggaccttcgccgccaacctggaaaaggccaacctgctgcctaagggcgaccccgagcggagaaggctgctgagcatcgtggtcgtgggcggaggccccacaggcgtggaagctgctggcgagctgcaggactacgtgcaccaggacctgcggaagttcctgcccgccctggccgaggaagtgcagattcacctggtggaagccctgcccatcgtgctgaacatgttcgagaagaagctgagcagctacgcccagagccacctggaaaacacctccatcaaggtgcacctgagaaccgccgtggccaaggtggaagagaagcagctgctggccaagaccaagcacgaggacggcaagattaccgaggaaaccatcccctacggcaccctgatttgggccaccggcaacaaggccagacccgtgatcaccgacctgttcaagaagatccccgagcagaacagcagcaagcggggcctggccgtgaacgacttcctgcaggtcaaaggcagcaacaacatcttcgccatcggcgacaacgcctttgccggcctgcctcctacagcccaggtggcccaccaggaagccgagtacctggccaagaacttcgacaagatggcccagatccccaatttccagaagaacctgtcctcccggaaggataagatcgacctgctgttcgaggaaaacaacttcaagcccttcaagtacaacgacctgggcgccctggcctacctgggcagcgaaagagccattgccaccatcagaagcggcaagcggaccttctacaccggcggaggcctgatgaccttctacctgtggcggatcctgtacatgagcatgatcctgagcgcccgcagcagactgaaggtgttcttcgactggatcaagctggccttcttcaagagggacttcttcaagggcctgtga

SEQ ID NO: 714 - DNA, 1542 bp, Artificial Sequence
  source: /note="Description of Artificial Sequence: Synthetic polynucleotide"
atgctgagcaagaacctgtacagcaacaagcggctgctgaccagcaccaacaccctcgtgcgcttcgccagcaccagatccaccggcgtcgaaaacagcggggctggccccaccagcttcaagaccatgaaggtcatcgacccccagcacagcgacaagcccaacgtgctgatcctgggctctggctggggcgccatcagctttctgaagcacatcgacaccaagaagtacaacgtcagcatcatcagccccagaagctacttcctgtacacccccctgctgcccagcgcccctgtgggaaccgtggacgagaagtccatcatcgagcccatcgtgaacttcgccctgaagaaaaagggcaacgtcacctactacgaggccgaggccaccagcatcaaccccgaccggaacaccgtgaccatcaagagcctgagcgccgtgtcccagctgtaccagcccgagaaccacctgggcctgcaccaggccgagcccgccgagattaagtacgactacctgatcagcgccgtgggcgccgagcccaacacctttggaatccccggcgtgaccgactacggccacttcctgaaagagatccccaacagcctggaaatccggcggaccttcgccgccaacctggaaaaggccaacctgctgcctaagggcgaccccgagcggagaaggctgctgagcatcgtggtcgtgggcggaggccccacaggcgtggaagctgctggcgagctgcaggactacgtgcaccaggacctgcggaagttcctgcccgccctggccgaggaagtgcagattcacctggtggaagccctgcccatcgtgctgaacatgttcgagaagaagctgagcagctacgcccagagccacctggaaaacacctccatcaaggtgcacctgagaaccgccgtggccaaggtggaagagaagcagctgctggccaagaccaagcacgaggacggcaagattaccgaggaaaccatcccctacggcaccctgatttgggccaccggcaacaaggccagacccgtgatcaccgacctgttcaagaagatccccgagcagaacagcagcaagcggggcctggccgtgaacgacttcctgcaggtcaaaggcagcaacaacatcttcgccatcggcgacaacgcctttgccggcctgcctcctacagcccaggtggcccaccaggaagccgagtacctggccaagaacttcgacaagatggcccagatccccaatttccagaagaacctgtcctcccggaaggataagatcgacctgctgttcgaggaaaacaacttcaagcccttcaagtacaacgacctgggcgccctggcctacctgggcagcgaaagagccattgccaccatcagaagcggcaagcggaccttctacaccggcggaggcctgatgaccttctacctgtggcggatcatctacctgagcatgatcctgagcgcccgcagcagactgaaggtgttcttcgactggatcaagctggccttcttcaagagggacttcttcaagggcctgtga

SEQ ID NO: 715 - DNA, 1542 bp, Artificial Sequence
  source: /note="Description of Artificial Sequence: Synthetic polynucleotide"
atgctgagcaagaacctgtacagcaacaagcggctgctgaccagcaccaacaccctcgtgcgcttcgccagcaccagatccaccggcgtcgaaaacagcggggctggccccaccagcttcaagaccatgaagatcatcgacccccagcacagcgacaagcccaacgtgctgatcctgggctctggctggggcgccatcagctttctgaagcacatcgacaccaagaagtacaacgtcagcatcatcagccccagaagctacttcctgtacacccccctgctgcccagcgcccctgtgggaaccgtggacgagaagtccatcatcgagcccatcgtgaacttcgccctgaagaaaaagggcaacgtcacctactacgaggccgaggccaccagcatcaaccccgaccggaacaccgtgaccatcaagagcctgagcgccgtgtcccagctgtaccagcccgagaaccacctgggcctgcaccaggccgagcccgccgagattaagtacgactacctgatcagcgccgtgggcgccgagcccaacacctttggaatccccggcgtgaccgactacggccacttcctgaaagagatccccaacagcctggaaatccggcggaccttcgccgccaacctggaaaaggccaacctgctgcctaagggcgaccccgagcggagaaggctgctgagcatcgtggtcgtgggcggaggccccacaggcgtggaagctgctggcgagctgcaggactacgtgcaccaggacctgcggaagttcctgcccgccctggccgaggaagtgcagattcacctggtggaagccctgcccatcgtgctgaacatgttcgagaagaagctgagcagctacgcccagagccacctggaaaacacctccatcaaggtgcacctgagaaccgccgtggccaaggtggaagagaagcagctgctggccaagaccaagcacgaggacggcaagattaccgaggaaaccatcccctacggcaccctgatttgggccaccggcaacaaggccagacccgtgatcaccgacctgttcaagaagatccccgagcagaacagcagcaagcggggcctggccgtgaacgacttcctgcaggtcaaaggcagcaacaacatcttcgccatcggcgacaacgcctttgccggcctgcctcctacagcccaggtggcccaccaggaagccgagtacctggccaagaacttcgacaagatggcccagatccccaatttccagaagaacctgtcctcccggaaggataagatcgacctgctgttcgaggaaaacaacttcaagcccttcaagtacaacgacctgggcgccctggcctacctgggcagcgaaagagccattgccaccatcagaagcggcaagcggaccttctacaccggcggaggcctgatgaccttctacctgtggcggatcctgtacctgagcatgatcctgagcgcccgcagcagactgaaggtgttcttcgactggatcaagctggccttcttcaagagggacttcttcaagggcctgtga

SEQ ID NO: 716 - DNA, 1542 bp, Artificial Sequence
  source: /note="Description of Artificial Sequence: Synthetic polynucleotide"
atgctgagcaagaacctgtacagcaacaagcggctgctgaccagcaccaacaccctcgtgcgcttcgccagcaccagatccaccggcgtcgaaaacagcggggctggccccaccagcttcaagaccatgaaggtcatcgacccccagcacagcgacaagcccaacgtgctgatcctgggctctggctggggcgccatcagctttctgaagcacatcgacaccaagaagtacaacgtcagcatcatcagccccagaagctacttcatcttcacccccctgctgcccagcgcccctgtgggaaccgtggacgagaagtccatcatcgagcccatcgtgaacttcgccctgaagaaaaagggcaacgtcacctactacgaggccgaggccaccagcatcaaccccgaccggaacaccgtgaccatcaagagcctgagcgccgtgtcccagctgtaccagcccgagaaccacctgggcctgcaccaggccgagcccgccgagattaagtacgactacctgatcagcgccgtgggcgccgagcccaacacctttggaatccccggcgtgaccgactacggccacttcctgaaagagatccccaacagcctggaaatccggcggaccttcgccgccaacctggaaaaggccaacctgctgcctaagggcgaccccgagcggagaaggctgctgagcatcgtggtcgtgggcggaggccccacaggcgtggaagctgctggcgagctgcaggactacgtgcaccaggacctgcggaagttcctgcccgccctggccgaggaaatccagattcacctggtggaagccctgcccatcgtgctgaacatgttcgagaagaagctgagcagctacgcccagagccacctggaaaacacctccatcaaggtgcacctgagaaccgccgtggccaaggtggaagagaagcagctgctggccaagaccaagcacgaggacggcaagattaccgaggaaaccatcccctacggcaccctgatttgggccaccggcaacaaggccagacccgtgatcaccgacctgttcaagaagatccccgagcagaacagcagcaagcggggcctggccgtgaacgacttcctgcaggtcaaaggcagcaacaacatcttcgccatcggcgacaacgcctttgccggcctgcctcctacagcccaggtggcccaccaggaagccgagtacctggccaagaacttcgacaagatggcccagatccccaatttccagaagaacctgtcctcccggaaggataagatcgacctgctgttcgaggaaaacaacttcaagcccttcaagtacaacgacctgggcgccctggcctacctgggcagcgaaagagccattgccaccatcagaagcggcaagcggaccttctacaccggcggaggcctgatgaccttctacctgtggcggatcctgtacctgagcatgatcctgagcgcccgcagcagactgaaggtgttcttcgactggatcaagctggccttcttcaagagggacttcttcaagggcctgtga

SEQ ID NO: 717 - DNA, 1542 bp, Artificial Sequence
  source: /note="Description of Artificial Sequence: Synthetic polynucleotide"
atgctgagcaagaacctgtacagcaacaagcggctgctgaccagcaccaacaccctcgtgcgcttcgccagcaccagatccaccggcgtcgaaaacagcggggctggccccaccagcttcaagaccatgaaggtcatcgacccccagcacagcgacaagcccaacgtgctgatcctgggctctggctggggcgccatcagctttctgaagcacatcgacaccaagaagtacaacgtcagcatcatcagccccagaagctacttcatcttcacccccctgctgcccagcgcccctgtgggaaccgtggacgagaagtccatcatcgagcccatcgtgaacttcgccctgaagaaaaagggcaacgtcacctactacgaggccgaggccaccagcatcaaccccgaccggaacaccgtgaccatcaagagcctgagcgccgtgtcccagctgtaccagcccgagaaccacctgggcctgcaccaggccgagcccgccgagattaagtacgactacctgatcagcgccgtgggcgccgagcccaacacctttggaatccccggcgtgaccgactacggccacttcctgaaagagatccccaacagcctggaaatccggcggaccttcgccgccaacctggaaaaggccaacctgctgcctaagggcgaccccgagcggagaaggctgctgagcatcgtggtcgtgggcggaggccccacaggcgtggaagctgctggcgagctgcaggactacgtgcaccaggacctgcggaagttcctgcccgccctggccgaggaagtgcagattcacctggtggaagccctgcccatcgtgctgaacatgttcgagaagaagctgagcagctacgcccagagccacctggaaaacacctccatcaaggtgcacctgagaaccgccgtggccaaggtggaagagaagcagctgctggccaagaccaagcacgaggacggcaagattaccgaggaaaccatcccctacggcaccctgatttgggccaccggcaacaaggccagacccgtgatcaccgacctgttcaagaagatccccgagcagaacagcagcaagcggggcctggccgtgaacgacttcctgcaggtcaaaggcagcaacaacatcttcgccatcggcgacaacgcctttgccggcctgcctcctacagcccaggtggcccaccaggaagccgagtacctggccaagaacttcgacaagatggcccagatccccaatttccagaagaacctgtcctcccggaaggataagatcgacctgctgttcgaggaaaacaacttcaagcccttcaagtacaacgacctgggcgccctggcctacctgggcagcgaaagagccattgccaccatcagaagcggcaagcggaccttctacaccggcggaggcctgatgaccttctacctgtggcggatcctgtacatgagcatgatcctgagcgcccgcagcagactgaaggtgttcttcgactggatcaagctggccttcttcaagagggacttcttcaagggcctgtga

SEQ ID NO: 718 - DNA, 1542 bp, Artificial Sequence
  source: /note="Description of Artificial Sequence: Synthetic polynucleotide"
atgctgagcaagaacctgtacagcaacaagcggctgctgaccagcaccaacaccctcgtgcgcttcgccagcaccagatccaccggcgtcgaaaacagcggggctggccccaccagcttcaagaccatgaaggtcatcgacccccagcacagcgacaagcccaacgtgctgatcctgggctctggctggggcgccatcagctttctgaagcacatcgacaccaagaagtacaacgtcagcatcatcagccccagaagctacttcatcttcacccccctgctgcccagcgcccctgtgggaaccgtggacgagaagtccatcatcgagcccatcgtgaacttcgccctgaagaaaaagggcaacgtcacctactacgaggccgaggccaccagcatcaaccccgaccggaacaccgtgaccatcaagagcctgagcgccgtgtcccagctgtaccagcccgagaaccacctgggcctgcaccaggccgagcccgccgagattaagtacgactacctgatcagcgccgtgggcgccgagcccaacacctttggaatccccggcgtgaccgactacggccacttcctgaaagagatccccaacagcctggaaatccggcggaccttcgccgccaacctggaaaaggccaacctgctgcctaagggcgaccccgagcggagaaggctgctgagcatcgtggtcgtgggcggaggccccacaggcgtggaagctgctggcgagctgcaggactacgtgcaccaggacctgcggaagttcctgcccgccctggccgaggaagtgcagattcacctggtggaagccctgcccatcgtgctgaacatgttcgagaagaagctgagcagctacgcccagagccacctggaaaacacctccatcaaggtgcacctgagaaccgccgtggccaaggtggaagagaagcagctgctggccaagaccaagcacgaggacggcaagattaccgaggaaaccatcccctacggcaccctgatttgggccaccggcaacaaggccagacccgtgatcaccgacctgttcaagaagatccccgagcagaacagcagcaagcggggcctggccgtgaacgacttcctgcaggtcaaaggcagcaacaacatcttcgccatcggcgacaacgcctttgccggcctgcctcctacagcccaggtggcccaccaggaagccgagtacctggccaagaacttcgacaagatggcccagatccccaatttccagaagaacctgtcctcccggaaggataagatcgacctgctgttcgaggaaaacaacttcaagcccttcaagtacaacgacctgggcgccctggcctacctgggcagcgaaagagccattgccaccatcagaagcggcaagcggaccttctacaccggcggaggcctgatgaccttctacctgtggcggatcatctacctgagcatgatcctgagcgcccgcagcagactgaaggtgttcttcgactggatcaagctggccttcttcaagagggacttcttcaagggcctgtga

SEQ ID NO: 719 - DNA, 1542 bp, Artificial Sequence
  source: /note="Description of Artificial Sequence: Synthetic polynucleotide"
atgctgagcaagaacctgtacagcaacaagcggctgctgaccagcaccaacaccctcgtgcgcttcgccagcaccagatccaccggcgtcgaaaacagcggggctggccccaccagcttcaagaccatgaagatcatcgacccccagcacagcgacaagcccaacgtgctgatcctgggctctggctggggcgccatcagctttctgaagcacatcgacaccaagaagtacaacgtcagcatcatcagccccagaagctacttcatcttcacccccctgctgcccagcgcccctgtgggaaccgtggacgagaagtccatcatcgagcccatcgtgaacttcgccctgaagaaaaagggcaacgtcacctactacgaggccgaggccaccagcatcaaccccgaccggaacaccgtgaccatcaagagcctgagcgccgtgtcccagctgtaccagcccgagaaccacctgggcctgcaccaggccgagcccgccgagattaagtacgactacctgatcagcgccgtgggcgccgagcccaacacctttggaatccccggcgtgaccgactacggccacttcctgaaagagatccccaacagcctggaaatccggcggaccttcgccgccaacctggaaaaggccaacctgctgcctaagggcgaccccgagcggagaaggctgctgagcatcgtggtcgtgggcggaggccccacaggcgtggaagctgctggcgagctgcaggactacgtgcaccaggacctgcggaagttcctgcccgccctggccgaggaagtgcagattcacctggtggaagccctgcccatcgtgctgaacatgttcgagaagaagctgagcagctacgcccagagccacctggaaaacacctccatcaaggtgcacctgagaaccgccgtggccaaggtggaagagaagcagctgctggccaagaccaagcacgaggacggcaagattaccgaggaaaccatcccctacggcaccctgatttgggccaccggcaacaaggccagacccgtgatcaccgacctgttcaagaagatccccgagcagaacagcagcaagcggggcctggccgtgaacgacttcctgcaggtcaaaggcagcaacaacatcttcgccatcggcgacaacgcctttgccggcctgcctcctacagcccaggtggcccaccaggaagccgagtacctggccaagaacttcgacaagatggcccagatccccaatttccagaagaacctgtcctcccggaaggataagatcgacctgctgttcgaggaaaacaacttcaagcccttcaagtacaacgacctgggcgccctggcctacctgggcagcgaaagagccattgccaccatcagaagcggcaagcggaccttctacaccggcggaggcctgatgaccttctacctgtggcggatcctgtacctgagcatgatcctgagcgcccgcagcagactgaaggtgttcttcgactggatcaagctggccttcttcaagagggacttcttcaagggcctgtga

SEQ ID NO: 720 - DNA, 1542 bp, Artificial Sequence
  source: /note="Description of Artificial Sequence: Synthetic polynucleotide"
atgctgagcaagaacctgtacagcaacaagcggctgctgaccagcaccaacaccctcgtgcgcttcgccagcaccagatccaccggcgtcgaaaacagcggggctggccccaccagcttcaagaccatgaaggtcatcgacccccagcacagcgacaagcccaacgtgctgatcctgggctctggctggggcgccatcagctttctgaagcacatcgacaccaagaagtacaacgtcagcatcatcagccccagaagctacttcctgttcacccccctgctgcccagcgcccctgtgggaaccgtggacgagaagtccatcatcgagcccatcgtgaacttcgccctgaagaaaaagggcaacgtcacctactacgaggccgaggccaccagcatcaaccccgaccggaacaccgtgaccatcaagagcctgagcgccgtgtcccagctgtaccagcccgagaaccacctgggcctgcaccaggccgagcccgccgagattaagtacgactacctgatcagcgccgtgggcgccgagcccaacacctttggaatccccggcgtgaccgactacggccacttcctgaaagagatccccaacagcctggaaatccggcggaccttcgccgccaacctggaaaaggccaacctgctgcctaagggcgaccccgagcggagaaggctgctgagcatcgtggtcgtgggcggaggccccacaggcgtggaagctgctggcgagctgcaggactacgtgcaccaggacctgcggaagttcctgcccgccctggccgaggaaatccagattcacctggtggaagccctgcccatcgtgctgaacatgttcgagaagaagctgagcagctacgcccagagccacctggaaaacacctccatcaaggtgcacctgagaaccgccgtggccaaggtggaagagaagcagctgctggccaagaccaagcacgaggacggcaagattaccgaggaaaccatcccctacggcaccctgatttgggccaccggcaacaaggccagacccgtgatcaccgacctgttcaagaagatccccgagcagaacagcagcaagcggggcctggccgtgaacgacttcctgcaggtcaaaggcagcaacaacatcttcgccatcggcgacaacgcctttgccggcctgcctcctacagcccaggtggcccaccaggaagccgagtacctggccaagaacttcgacaagatggcccagatccccaatttccagaagaacctgtcctcccggaaggataagatcgacctgctgttcgaggaaaacaacttcaagcccttcaagtacaacgacctgggcgccctggcctacctgggcagcgaaagagccattgccaccatcagaagcggcaagcggaccttctacaccggcggaggcctgatgaccttctacctgtggcggatcctgtacatgagcatgatcctgagcgcccgcagcagactgaaggtgttcttcgactggatcaagctggccttcttcaagagggacttcttcaagggcctgtga

SEQ ID NO: 721 - DNA, 1542 bp, Artificial Sequence
  source: /note="Description of Artificial Sequence: Synthetic polynucleotide"
atgctgagcaagaacctgtacagcaacaagcggctgctgaccagcaccaacaccctcgtgcgcttcgccagcaccagatccaccggcgtcgaaaacagcggggctggccccaccagcttcaagaccatgaaggtcatcgacccccagcacagcgacaagcccaacgtgctgatcctgggctctggctggggcgccatcagctttctgaagcacatcgacaccaagaagtacaacgtcagcatcatcagccccagaagctacttcctgttcacccccctgctgcccagcgcccctgtgggaaccgtggacgagaagtccatcatcgagcccatcgtgaacttcgccctgaagaaaaagggcaacgtcacctactacgaggccgaggccaccagcatcaaccccgaccggaacaccgtgaccatcaagagcctgagcgccgtgtcccagctgtaccagcccgagaaccacctgggcctgcaccaggccgagcccgccgagattaagtacgactacctgatcagcgccgtgggcgccgagcccaacacctttggaatccccggcgtgaccgactacggccacttcctgaaagagatccccaacagcctggaaatccggcggaccttcgccgccaacctggaaaaggccaacctgctgcctaagggcgaccccgagcggagaaggctgctgagcatcgtggtcgtgggcggaggccccacaggcgtggaagctgctggcgagctgcaggactacgtgcaccaggacctgcggaagttcctgcccgccctggccgaggaaatccagattcacctggtggaagccctgcccatcgtgctgaacatgttcgagaagaagctgagcagctacgcccagagccacctggaaaacacctccatcaaggtgcacctgagaaccgccgtggccaaggtggaagagaagcagctgctggccaagaccaagcacgaggacggcaagattaccgaggaaaccatcccctacggcaccctgatttgggccaccggcaacaaggccagacccgtgatcaccgacctgttcaagaagatccccgagcagaacagcagcaagcggggcctggccgtgaacgacttcctgcaggtcaaaggcagcaacaacatcttcgccatcggcgacaacgcctttgccggcctgcctcctacagcccaggtggcccaccaggaagccgagtacctggccaagaacttcgacaagatggcccagatccccaatttccagaagaacctgtcctcccggaaggataagatcgacctgctgttcgaggaaaacaacttcaagcccttcaagtacaacgacctgggcgccctggcctacctgggcagcgaaagagccattgccaccatcagaagcggcaagcggaccttctacaccggcggaggcctgatgaccttctacctgtggcggatcatctacctgagcatgatcctgagcgcccgcagcagactgaaggtgttcttcgactggatcaagctggccttcttcaagagggacttcttcaagggcctgtga

SEQ ID NO: 722 - DNA, 1542 bp, Artificial Sequence
  source: /note="Description of Artificial Sequence: Synthetic polynucleotide"
atgctgagcaagaacctgtacagcaacaagcggctgctgaccagcaccaacaccctcgtgcgcttcgccagcaccagatccaccggcgtcgaaaacagcggggctggccccaccagcttcaagaccatgaagatcatcgacccccagcacagcgacaagcccaacgtgctgatcctgggctctggctggggcgccatcagctttctgaagcacatcgacaccaagaagtacaacgtcagcatcatcagccccagaagctacttcctgttcacccccctgctgcccagcgcccctgtgggaaccgtggacgagaagtccatcatcgagcccatcgtgaacttcgccctgaagaaaaagggcaacgtcacctactacgaggccgaggccaccagcatcaaccccgaccggaacaccgtgaccatcaagagcctgagcgccgtgtcccagctgtaccagcccgagaaccacctgggcctgcaccaggccgagcccgccgagattaagtacgactacctgatcagcgccgtgggcgccgagcccaacacctttggaatccccggcgtgaccgactacggccacttcctgaaagagatccccaacagcctggaaatccggcggaccttcgccgccaacctggaaaaggccaacctgctgcctaagggcgaccccgagcggagaaggctgctgagcatcgtggtcgtgggcggaggccccacaggcgtggaagctgctggcgagctgcaggactacgtgcaccaggacctgcggaagttcctgcccgccctggccgaggaaatccagattcacctggtggaagccctgcccatcgtgctgaacatgttcgagaagaagctgagcagctacgcccagagccacctggaaaacacctccatcaaggtgcacctgagaaccgccgtggccaaggtggaagagaagcagctgctggccaagaccaagcacgaggacggcaagattaccgaggaaaccatcccctacggcaccctgatttgggccaccggcaacaaggccagacccgtgatcaccgacctgttcaagaagatccccgagcagaacagcagcaagcggggcctggccgtgaacgacttcctgcaggtcaaaggcagcaacaacatcttcgccatcggcgacaacgcctttgccggcctgcctcctacagcccaggtggcccaccaggaagccgagtacctggccaagaacttcgacaagatggcccagatccccaatttccagaagaacctgtcctcccggaaggataagatcgacctgctgttcgaggaaaacaacttcaagcccttcaagtacaacgacctgggcgccctggcctacctgggcagcgaaagagccattgccaccatcagaagcggcaagcggaccttctacaccggcggaggcctgatgaccttctacctgtggcggatcctgtacctgagcatgatcctgagcgcccgcagcagactgaaggtgttcttcgactggatcaagctggccttcttcaagagggacttcttcaagggcctgtga

SEQ ID NO: 723 - DNA, 1542 bp, Artificial Sequence
  source: /note="Description of Artificial Sequence: Synthetic polynucleotide"
atgctgagcaagaacctgtacagcaacaagcggctgctgaccagcaccaacaccctcgtgcgcttcgccagcaccagatccaccggcgtcgaaaacagcggggctggccccaccagcttcaagaccatgaaggtcatcgacccccagcacagcgacaagcccaacgtgctgatcctgggctctggctggggcgccatcagctttctgaagcacatcgacaccaagaagtacaacgtcagcatcatcagccccagaagctacttcctgttcacccccctgctgcccagcgcccctgtgggaaccgtggacgagaagtccatcatcgagcccatcgtgaacttcgccctgaagaaaaagggcaacgtcacctactacgaggccgaggccaccagcatcaaccccgaccggaacaccgtgaccatcaagagcctgagcgccgtgtcccagctgtaccagcccgagaaccacctgggcctgcaccaggccgagcccgccgagattaagtacgactacctgatcagcgccgtgggcgccgagcccaacacctttggaatccccggcgtgaccgactacggccacttcctgaaagagatccccaacagcctggaaatccggcggaccttcgccgccaacctggaaaaggccaacctgctgcctaagggcgaccccgagcggagaaggctgctgagcatcgtggtcgtgggcggaggccccacaggcgtggaagctgctggcgagctgcaggactacgtgcaccaggacctgcggaagttcctgcccgccctggccgaggaagtgcagattcacctggtggaagccctgcccatcgtgctgaacatgttcgagaagaagctgagcagctacgcccagagccacctggaaaacacctccatcaaggtgcacctgagaaccgccgtggccaaggtggaagagaagcagctgctggccaagaccaagcacgaggacggcaagattaccgaggaaaccatcccctacggcaccctgatttgggccaccggcaacaaggccagacccgtgatcaccgacctgttcaagaagatccccgagcagaacagcagcaagcggggcctggccgtgaacgacttcctgcaggtcaaaggcagcaacaacatcttcgccatcggcgacaacgcctttgccggcctgcctcctacagcccaggtggcccaccaggaagccgagtacctggccaagaacttcgacaagatggcccagatccccaatttccagaagaacctgtcctcccggaaggataagatcgacctgctgttcgaggaaaacaacttcaagcccttcaagtacaacgacctgggcgccctggcctacctgggcagcgaaagagccattgccaccatcagaagcggcaagcggaccttctacaccggcggaggcctgatgaccttctacctgtggcggatcatctacatgagcatgatcctgagcgcccgcagcagactgaaggtgttcttcgactggatcaagctggccttcttcaagagggacttcttcaagggcctgtga

SEQ ID NO: 724 - DNA, 1542 bp, Artificial Sequence
  source: /note="Description of Artificial Sequence: Synthetic polynucleotide"
atgctgagcaagaacctgtacagcaacaagcggctgctgaccagcaccaacaccctcgtgcgcttcgccagcaccagatccaccggcgtcgaaaacagcggggctggccccaccagcttcaagaccatgaagatcatcgacccccagcacagcgacaagcccaacgtgctgatcctgggctctggctggggcgccatcagctttctgaagcacatcgacaccaagaagtacaacgtcagcatcatcagccccagaagctacttcctgttcacccccctgctgcccagcgcccctgtgggaaccgtggacgagaagtccatcatcgagcccatcgtgaacttcgccctgaagaaaaagggcaacgtcacctactacgaggccgaggccaccagcatcaaccccgaccggaacaccgtgaccatcaagagcctgagcgccgtgtcccagctgtaccagcccgagaaccacctgggcctgcaccaggccgagcccgccgagattaagtacgactacctgatcagcgccgtgggcgccgagcccaacacctttggaatccccggcgtgaccgactacggccacttcctgaaagagatccccaacagcctggaaatccggcggaccttcgccgccaacctggaaaaggccaacctgctgcctaagggcgaccccgagcggagaaggctgctgagcatcgtggtcgtgggcggaggccccacaggcgtggaagctgctggcgagctgcaggactacgtgcaccaggacctgcggaagttcctgcccgccctggccgaggaagtgcagattcacctggtggaagccctgcccatcgtgctgaacatgttcgagaagaagctgagcagctacgcccagagccacctggaaaacacctccatcaaggtgcacctgagaaccgccgtggccaaggtggaagagaagcagctgctggccaagaccaagcacgaggacggcaagattaccgaggaaaccatcccctacggcaccctgatttgggccaccggcaacaaggccagacccgtgatcaccgacctgttcaagaagatccccgagcagaacagcagcaagcggggcctggccgtgaacgacttcctgcaggtcaaaggcagcaacaacatcttcgccatcggcgacaacgcctttgccggcctgcctcctacagcccaggtggcccaccaggaagccgagtacctggccaagaacttcgacaagatggcccagatccccaatttccagaagaacctgtcctcccggaaggataagatcgacctgctgttcgaggaaaacaacttcaagcccttcaagtacaacgacctgggcgccctggcctacctgggcagcgaaagagccattgccaccatcagaagcggcaagcggaccttctacaccggcggaggcctgatgaccttctacctgtggcggatcctgtacatgagcatgatcctgagcgcccgcagcagactgaaggtgttcttcgactggatcaagctggccttcttcaagagggacttcttcaagggcctgtga

SEQ ID NO: 725 - DNA, 1542 bp, Artificial Sequence
  source: /note="Description of Artificial Sequence: Synthetic polynucleotide"
atgctgagcaagaacctgtacagcaacaagcggctgctgaccagcaccaacaccctcgtgcgcttcgccagcaccagatccaccggcgtcgaaaacagcggggctggccccaccagcttcaagaccatgaagatcatcgacccccagcacagcgacaagcccaacgtgctgatcctgggctctggctggggcgccatcagctttctgaagcacatcgacaccaagaagtacaacgtcagcatcatcagccccagaagctacttcctgttcacccccctgctgcccagcgcccctgtgggaaccgtggacgagaagtccatcatcgagcccatcgtgaacttcgccctgaagaaaaagggcaacgtcacctactacgaggccgaggccaccagcatcaaccccgaccggaacaccgtgaccatcaagagcctgagcgccgtgtcccagctgtaccagcccgagaaccacctgggcctgcaccaggccgagcccgccgagattaagtacgactacctgatcagcgccgtgggcgccgagcccaacacctttggaatccccggcgtgaccgactacggccacttcctgaaagagatccccaacagcctggaaatccggcggaccttcgccgccaacctggaaaaggccaacctgctgcctaagggcgaccccgagcggagaaggctgctgagcatcgtggtcgtgggcggaggccccacaggcgtggaagctgctggcgagctgcaggactacgtgcaccaggacctgcggaagttcctgcccgccctggccgaggaagtgcagattcacctggtggaagccctgcccatcgtgctgaacatgttcgagaagaagctgagcagctacgcccagagccacctggaaaacacctccatcaaggtgcacctgagaaccgccgtggccaaggtggaagagaagcagctgctggccaagaccaagcacgaggacggcaagattaccgaggaaaccatcccctacggcaccctgatttgggccaccggcaacaaggccagacccgtgatcaccgacctgttcaagaagatccccgagcagaacagcagcaagcggggcctggccgtgaacgacttcctgcaggtcaaaggcagcaacaacatcttcgccatcggcgacaacgcctttgccggcctgcctcctacagcccaggtggcccaccaggaagccgagtacctggccaagaacttcgacaagatggcccagatccccaatttccagaagaacctgtcctcccggaaggataagatcgacctgctgttcgaggaaaacaacttcaagcccttcaagtacaacgacctgggcgccctggcctacctgggcagcgaaagagccattgccaccatcagaagcggcaagcggaccttctacaccggcggaggcctgatgaccttctacctgtggcggatcatctacctgagcatgatcctgagcgcccgcagcagactgaaggtgttcttcgactggatcaagctggccttcttcaagagggacttcttcaagggcctgtga

SEQ ID NO: 726 - DNA, 1542 bp, Artificial Sequence
  source: /note="Description of Artificial Sequence: Synthetic polynucleotide"
atgctgagcaagaacctgtacagcaacaagcggctgctgaccagcaccaacaccctcgtgcgcttcgccagcaccagatccaccggcgtcgaaaacagcggggctggccccaccagcttcaagaccatgaaggtcatcgacccccagcacagcgacaagcccaacgtgctgatcctgggctctggctggggcgccatcagctttctgaagcacatcgacaccaagaagtacaacgtcagcatcgtgagccccagaagctacttcatctacacccccctgctgcccagcgcccctgtgggaaccgtggacgagaagtccatcatcgagcccatcgtgaacttcgccctgaagaaaaagggcaacgtcacctactacgaggccgaggccaccagcatcaaccccgaccggaacaccgtgaccatcaagagcctgagcgccgtgtcccagctgtaccagcccgagaaccacctgggcctgcaccaggccgagcccgccgagattaagtacgactacctgatcagcgccgtgggcgccgagcccaacacctttggaatccccggcgtgaccgactacggccacttcctgaaagagatccccaacagcctggaaatccggcggaccttcgccgccaacctggaaaaggccaacctgctgcctaagggcgaccccgagcggagaaggctgctgagcatcgtggtcgtgggcggaggccccacaggcgtggaagctgctggcgagctgcaggactacgtgcaccaggacctgcggaagttcctgcccgccctggccgaggaagtgcagattcacctggtggaagccctgcccatcgtgctgaacatgttcgagaagaagctgagcagctacgcccagagccacctggaaaacacctccatcaaggtgcacctgagaaccgccgtggccaaggtggaagagaagcagctgctggccaagaccaagcacgaggacggcaagattaccgaggaaaccatcccctacggcaccctgatttgggccaccggcaacaaggccagacccgtgatcaccgacctgttcaagaagatccccgagcagaacagcagcaagcggggcctggccgtgaacgacttcctgcaggtcaaaggcagcaacaacatcttcgccatcggcgacaacgcctttgccggcctgcctcctacagcccaggtggcccaccaggaagccgagtacctggccaagaacttcgacaagatggcccagatccccaatttccagaagaacctgtcctcccggaaggataagatcgacctgctgttcgaggaaaacaacttcaagcccttcaagtacaacgacctgggcgccctggcctacctgggcagcgaaagagccattgccaccatcagaagcggcaagcggaccttctacaccggcggaggcctgatgaccttctacctgtggcggatcctgtacctgagcatgatcctgagcgcccgcagcagactgaaggtgttcttcgactggatcaagctggccttcttcaagagggacttcttcaagggcctgtga

SEQ ID NO: 727 - DNA, 1542 bp, Artificial Sequence
  source: /note="Description of Artificial Sequence: Synthetic polynucleotide"
atgctgagcaagaacctgtacagcaacaagcggctgctgaccagcaccaacaccctcgtgcgcttcgccagcaccagatccaccggcgtcgaaaacagcggggctggccccaccagcttcaagaccatgaaggtcatcgacccccagcacagcgacaagcccaacgtgctgatcctgggctctggctggggcgccatcagctttctgaagcacatcgacaccaagaagtacaacgtcagcatcgtgagccccagaagctacttcctgtacacccccctgctgcccagcgcccctgtgggaaccgtggacgagaagtccatcatcgagcccatcgtgaacttcgccctgaagaaaaagggcaacgtcacctactacgaggccgaggccaccagcatcaaccccgaccggaacaccgtgaccatcaagagcctgagcgccgtgtcccagctgtaccagcccgagaaccacctgggcctgcaccaggccgagcccgccgagattaagtacgactacctgatcagcgccgtgggcgccgagcccaacacctttggaatccccggcgtgaccgactacggccacttcctgaaagagatccccaacagcctggaaatccggcggaccttcgccgccaacctggaaaaggccaacctgctgcctaagggcgaccccgagcggagaaggctgctgagcatcgtggtcgtgggcggaggccccacaggcgtggaagctgctggcgagctgcaggactacgtgcaccaggacctgcggaagttcctgcccgccctggccgaggaaatccagattcacctggtggaagccctgcccatcgtgctgaacatgttcgagaagaagctgagcagctacgcccagagccacctggaaaacacctccatcaaggtgcacctgagaaccgccgtggccaaggtggaagagaagcagctgctggccaagaccaagcacgaggacggcaagattaccgaggaaaccatcccctacggcaccctgatttgggccaccggcaacaaggccagacccgtgatcaccgacctgttcaagaagatccccgagcagaacagcagcaagcggggcctggccgtgaacgacttcctgcaggtcaaaggcagcaacaacatcttcgccatcggcgacaacgcctttgccggcctgcctcctacagcccaggtggcccaccaggaagccgagtacctggccaagaacttcgacaagatggcccagatccccaatttccagaagaacctgtcctcccggaaggataagatcgacctgctgttcgaggaaaacaacttcaagcccttcaagtacaacgacctgggcgccctggcctacctgggcagcgaaagagccattgccaccatcagaagcggcaagcggaccttctacaccggcggaggcctgatgaccttctacctgtggcggatcctgtacctgagcatgatcctgagcgcccgcagcagactgaaggtgttcttcgactggatcaagctggccttcttcaagagggacttcttcaagggcctgtga

SEQ ID NO: 728 - DNA, 1542 bp, Artificial Sequence
  source: /note="Description of Artificial Sequence: Synthetic polynucleotide"
atgctgagcaagaacctgtacagcaacaagcggctgctgaccagcaccaacaccctcgtgcgcttcgccagcaccagatccaccggcgtcgaaaacagcggggctggccccaccagcttcaagaccatgaaggtcatcgacccccagcacagcgacaagcccaacgtgctgatcctgggctctggctggggcgccatcagctttctgaagcacatcgacaccaagaagtacaacgtcagcatcgtgagccccagaagctacttcctgtacacccccctgctgcccagcgcccctgtgggaaccgtggacgagaagtccatcatcgagcccatcgtgaacttcgccctgaagaaaaagggcaacgtcacctactacgaggccgaggccaccagcatcaaccccgaccggaacaccgtgaccatcaagagcctgagcgccgtgtcccagctgtaccagcccgagaaccacctgggcctgcaccaggccgagcccgccgagattaagtacgactacctgatcagcgccgtgggcgccgagcccaacacctttggaatccccggcgtgaccgactacggccacttcctgaaagagatccccaacagcctggaaatccggcggaccttcgccgccaacctggaaaaggccaacctgctgcctaagggcgaccccgagcggagaaggctgctgagcatcgtggtcgtgggcggaggccccacaggcgtggaagctgctggcgagctgcaggactacgtgcaccaggacctgcggaagttcctgcccgccctggccgaggaagtgcagattcacctggtggaagccctgcccatcgtgctgaacatgttcgagaagaagctgagcagctacgcccagagccacctggaaaacacctccatcaaggtgcacctgagaaccgccgtggccaaggtggaagagaagcagctgctggccaagaccaagcacgaggacggcaagattaccgaggaaaccatcccctacggcaccctgatttgggccaccggcaacaaggccagacccgtgatcaccgacctgttcaagaagatccccgagcagaacagcagcaagcggggcctggccgtgaacgacttcctgcaggtcaaaggcagcaacaacatcttcgccatcggcgacaacgcctttgccggcctgcctcctacagcccaggtggcccaccaggaagccgagtacctggccaagaacttcgacaagatggcccagatccccaatttccagaagaacctgtcctcccggaaggataagatcgacctgctgttcgaggaaaacaacttcaagcccttcaagtacaacgacctgggcgccctggcctacctgggcagcgaaagagccattgccaccatcagaagcggcaagcggaccttctacaccggcggaggcctgatgaccttctacctgtggcggatcctgtacatgagcatgatcctgagcgcccgcagcagactgaaggtgttcttcgactggatcaagctggccttcttcaagagggacttcttcaagggcctgtga

SEQ ID NO: 729 - DNA, 1542 bp, Artificial Sequence
  source: /note="Description of Artificial Sequence: Synthetic polynucleotide"
atgctgagcaagaacctgtacagcaacaagcggctgctgaccagcaccaacaccctcgtgcgcttcgccagcaccagatccaccggcgtcgaaaacagcggggctggccccaccagcttcaagaccatgaaggtcatcgacccccagcacagcgacaagcccaacgtgctgatcctgggctctggctggggcgccatcagctttctgaagcacatcgacaccaagaagtacaacgtcagcatcgtgagccccagaagctacttcctgtacacccccctgctgcccagcgcccctgtgggaaccgtggacgagaagtccatcatcgagcccatcgtgaacttcgccctgaagaaaaagggcaacgtcacctactacgaggccgaggccaccagcatcaaccccgaccggaacaccgtgaccatcaagagcctgagcgccgtgtcccagctgtaccagcccgagaaccacctgggcctgcaccaggccgagcccgccgagattaagtacgactacctgatcagcgccgtgggcgccgagcccaacacctttggaatccccggcgtgaccgactacggccacttcctgaaagagatccccaacagcctggaaatccggcggaccttcgccgccaacctggaaaaggccaacctgctgcctaagggcgaccccgagcggagaaggctgctgagcatcgtggtcgtgggcggaggccccacaggcgtggaagctgctggcgagctgcaggactacgtgcaccaggacctgcggaagttcctgcccgccctggccgaggaagtgcagattcacctggtggaagccctgcccatcgtgctgaacatgttcgagaagaagctgagcagctacgcccagagccacctggaaaacacctccatcaaggtgcacctgagaaccgccgtggccaaggtggaagagaagcagctgctggccaagaccaagcacgaggacggcaagattaccgaggaaaccatcccctacggcaccctgatttgggccaccggcaacaaggccagacccgtgatcaccgacctgttcaagaagatccccgagcagaacagcagcaagcggggcctggccgtgaacgacttcctgcaggtcaaaggcagcaacaacatcttcgccatcggcgacaacgcctttgccggcctgcctcctacagcccaggtggcccaccaggaagccgagtacctggccaagaacttcgacaagatggcccagatccccaatttccagaagaacctgtcctcccggaaggataagatcgacctgctgttcgaggaaaacaacttcaagcccttcaagtacaacgacctgggcgccctggcctacctgggcagcgaaagagccattgccaccatcagaagcggcaagcggaccttctacaccggcggaggcctgatgaccttctacctgtggcggatcatctacctgagcatgatcctgagcgcccgcagcagactgaaggtgttcttcgactggatcaagctggccttcttcaagagggacttcttcaagggcctgtga

SEQ ID NO: 730 - DNA, 1542 bp, Artificial Sequence
  source: /note="Description of Artificial Sequence: Synthetic polynucleotide"
atgctgagcaagaacctgtacagcaacaagcggctgctgaccagcaccaacaccctcgtgcgcttcgccagcaccagatccaccggcgtcgaaaacagcggggctggccccaccagcttcaagaccatgaagatcatcgacccccagcacagcgacaagcccaacgtgctgatcctgggctctggctggggcgccatcagctttctgaagcacatcgacaccaagaagtacaacgtcagcatcgtgagccccagaagctacttcctgtacacccccctgctgcccagcgcccctgtgggaaccgtggacgagaagtccatcatcgagcccatcgtgaacttcgccctgaagaaaaagggcaacgtcacctactacgaggccgaggccaccagcatcaaccccgaccggaacaccgtgaccatcaagagcctgagcgccgtgtcccagctgtaccagcccgagaaccacctgggcctgcaccaggccgagcccgccgagattaagtacgactacctgatcagcgccgtgggcgccgagcccaacacctttggaatccccggcgtgaccgactacggccacttcctgaaagagatccccaacagcctggaaatccggcggaccttcgccgccaacctggaaaaggccaacctgctgcctaagggcgaccccgagcggagaaggctgctgagcatcgtggtcgtgggcggaggccccacaggcgtggaagctgctggcgagctgcaggactacgtgcaccaggacctgcggaagttcctgcccgccctggccgaggaagtgcagattcacctggtggaagccctgcccatcgtgctgaacatgttcgagaagaagctgagcagctacgcccagagccacctggaaaacacctccatcaaggtgcacctgagaaccgccgtggccaaggtggaagagaagcagctgctggccaagaccaagcacgaggacggcaagattaccgaggaaaccatcccctacggcaccctgatttgggccaccggcaacaaggccagacccgtgatcaccgacctgttcaagaagatccccgagcagaacagcagcaagcggggcctggccgtgaacgacttcctgcaggtcaaaggcagcaacaacatcttcgccatcggcgacaacgcctttgccggcctgcctcctacagcccaggtggcccaccaggaagccgagtacctggccaagaacttcgacaagatggcccagatccccaatttccagaagaacctgtcctcccggaaggataagatcgacctgctgttcgaggaaaacaacttcaagcccttcaagtacaacgacctgggcgccctggcctacctgggcagcgaaagagccattgccaccatcagaagcggcaagcggaccttctacaccggcggaggcctgatgaccttctacctgtggcggatcctgtacctgagcatgatcctgagcgcccgcagcagactgaaggtgttcttcgactggatcaagctggccttcttcaagagggacttcttcaagggcctgtga

SEQ ID NO: 731 - DNA, 1542 bp, Artificial Sequence
  source: /note="Description of Artificial Sequence: Synthetic polynucleotide"
atgctgagcaagaacctgtacagcaacaagcggctgctgaccagcaccaacaccctcgtgcgcttcgccagcaccagatccaccggcgtcgaaaacagcggggctggccccaccagcttcaagaccatgaaggtcatcgacccccagcacagcgacaagcccaacgtgctgatcctgggctctggctggggcgccatcagctttctgaagcacatcgacaccaagaagtacaacgtcagcatcgtgagccccagaagctacttcatcttcacccccctgctgcccagcgcccctgtgggaaccgtggacgagaagtccatcatcgagcccatcgtgaacttcgccctgaagaaaaagggcaacgtcacctactacgaggccgaggccaccagcatcaaccccgaccggaacaccgtgaccatcaagagcctgagcgccgtgtcccagctgtaccagcccgagaaccacctgggcctgcaccaggccgagcccgccgagattaagtacgactacctgatcagcgccgtgggcgccgagcccaacacctttggaatccccggcgtgaccgactacggccacttcctgaaagagatccccaacagcctggaaatccggcggaccttcgccgccaacctggaaaaggccaacctgctgcctaagggcgaccccgagcggagaaggctgctgagcatcgtggtcgtgggcggaggccccacaggcgtggaagctgctggcgagctgcaggactacgtgcaccaggacctgcggaagttcctgcccgccctggccgaggaaatccagattcacctggtggaagccctgcccatcgtgctgaacatgttcgagaagaagctgagcagctacgcccagagccacctggaaaacacctccatcaaggtgcacctgagaaccgccgtggccaaggtggaagagaagcagctgctggccaagaccaagcacgaggacggcaagattaccgaggaaaccatcccctacggcaccctgatttgggccaccggcaacaaggccagacccgtgatcaccgacctgttcaagaagatccccgagcagaacagcagcaagcggggcctggccgtgaacgacttcctgcaggtcaaaggcagcaacaacatcttcgccatcggcgacaacgcctttgccggcctgcctcctacagcccaggtggcccaccaggaagccgagtacctggccaagaacttcgacaagatggcccagatccccaatttccagaagaacctgtcctcccggaaggataagatcgacctgctgttcgaggaaaacaacttcaagcccttcaagtacaacgacctgggcgccctggcctacctgggcagcgaaagagccattgccaccatcagaagcggcaagcggaccttctacaccggcggaggcctgatgaccttctacctgtggcggatcctgtacctgagcatgatcctgagcgcccgcagcagactgaaggtgttcttcgactggatcaagctggccttcttcaagagggacttcttcaagggcctgtga

SEQ ID NO: 732 - DNA, 1542 bp, Artificial Sequence
  source: /note="Description of Artificial Sequence: Synthetic polynucleotide"
atgctgagcaagaacctgtacagcaacaagcggctgctgaccagcaccaacaccctcgtgcgcttcgccagcaccagatccaccggcgtcgaaaacagcggggctggccccaccagcttcaagaccatgaaggtcatcgacccccagcacagcgacaagcccaacgtgctgatcctgggctctggctggggcgccatcagctttctgaagcacatcgacaccaagaagtacaacgtcagcatcgtgagccccagaagctacttcatcttcacccccctgctgcccagcgcccctgtgggaaccgtggacgagaagtccatcatcgagcccatcgtgaacttcgccctgaagaaaaagggcaacgtcacctactacgaggccgaggccaccagcatcaaccccgaccggaacaccgtgaccatcaagagcctgagcgccgtgtcccagctgtaccagcccgagaaccacctgggcctgcaccaggccgagcccgccgagattaagtacgactacctgatcagcgccgtgggcgccgagcccaacacctttggaatccccggcgtgaccgactacggccacttcctgaaagagatccccaacagcctggaaatccggcggaccttcgccgccaacctggaaaaggccaacctgctgcctaagggcgaccccgagcggagaaggctgctgagcatcgtggtcgtgggcggaggccccacaggcgtggaagctgctggcgagctgcaggactacgtgcaccaggacctgcggaagttcctgcccgccctggccgaggaagtgcagattcacctggtggaagccctgcccatcgtgctgaacatgttcgagaagaagctgagcagctacgcccagagccacctggaaaacacctccatcaaggtgcacctgagaaccgccgtggccaaggtggaagagaagcagctgctggccaagaccaagcacgaggacggcaagattaccgaggaaaccatcccctacggcaccctgatttgggccaccggcaacaaggccagacccgtgatcaccgacctgttcaagaagatccccgagcagaacagcagcaagcggggcctggccgtgaacgacttcctgcaggtcaaaggcagcaacaacatcttcgccatcggcgacaacgcctttgccggcctgcctcctacagcccaggtggcccaccaggaagccgagtacctggccaagaacttcgacaagatggcccagatccccaatttccagaagaacctgtcctcccggaaggataagatcgacctgctgttcgaggaaaacaacttcaagcccttcaagtacaacgacctgggcgccctggcctacctgggcagcgaaagagccattgccaccatcagaagcggcaagcggaccttctacaccggcggaggcctgatgaccttctacctgtggcggatcctgtacatgagcatgatcctgagcgcccgcagcagactgaaggtgttcttcgactggatcaagctggccttcttcaagagggacttcttcaagggcctgtga

SEQ ID NO: 733 - DNA, 1542 bp, Artificial Sequence
  source: /note="Description of Artificial Sequence: Synthetic polynucleotide"
atgctgagcaagaacctgtacagcaacaagcggctgctgaccagcaccaacaccctcgtgcgcttcgccagcaccagatccaccggcgtcgaaaacagcggggctggccccaccagcttcaagaccatgaaggtcatcgacccccagcacagcgacaagcccaacgtgctgatcctgggctctggctggggcgccatcagctttctgaagcacatcgacaccaagaagtacaacgtcagcatcgtgagccccagaagctacttcatcttcacccccctgctgcccagcgcccctgtgggaaccgtggacgagaagtccatcatcgagcccatcgtgaacttcgccctgaagaaaaagggcaacgtcacctactacgaggccgaggccaccagcatcaaccccgaccggaacaccgtgaccatcaagagcctgagcgccgtgtcccagctgtaccagcccgagaaccacctgggcctgcaccaggccgagcccgccgagattaagtacgactacctgatcagcgccgtgggcgccgagcccaacacctttggaatccccggcgtgaccgactacggccacttcctgaaagagatccccaacagcctggaaatccggcggaccttcgccgccaacctggaaaaggccaacctgctgcctaagggcgaccccgagcggagaaggctgctgagcatcgtggtcgtgggcggaggccccacaggcgtggaagctgctggcgagctgcaggactacgtgcaccaggacctgcggaagttcctgcccgccctggccgaggaagtgcagattcacctggtggaagccctgcccatcgtgctgaacatgttcgagaagaagctgagcagctacgcccagagccacctggaaaacacctccatcaaggtgcacctgagaaccgccgtggccaaggtggaagagaagcagctgctggccaagaccaagcacgaggacggcaagattaccgaggaaaccatcccctacggcaccctgatttgggccaccggcaacaaggccagacccgtgatcaccgacctgttcaagaagatccccgagcagaacagcagcaagcggggcctggccgtgaacgacttcctgcaggtcaaaggcagcaacaacatcttcgccatcggcgacaacgcctttgccggcctgcctcctacagcccaggtggcccaccaggaagccgagtacctggccaagaacttcgacaagatggcccagatccccaatttccagaagaacctgtcctcccggaaggataagatcgacctgctgttcgaggaaaacaacttcaagcccttcaagtacaacgacctgggcgccctggcctacctgggcagcgaaagagccattgccaccatcagaagcggcaagcggaccttctacaccggcggaggcctgatgaccttctacctgtggcggatcatctacctgagcatgatcctgagcgcccgcagcagactgaaggtgttcttcgactggatcaagctggccttcttcaagagggacttcttcaagggcctgtga

SEQ ID NO: 734 - DNA, 1542 bp, Artificial Sequence
  source: /note="Description of Artificial Sequence: Synthetic polynucleotide"
atgctgagcaagaacctgtacagcaacaagcggctgctgaccagcaccaacaccctcgtgcgcttcgccagcaccagatccaccggcgtcgaaaacagcggggctggccccaccagcttcaagaccatgaagatcatcgacccccagcacagcgacaagcccaacgtgctgatcctgggctctggctggggcgccatcagctttctgaagcacatcgacaccaagaagtacaacgtcagcatcgtgagccccagaagctacttcatcttcacccccctgctgcccagcgcccctgtgggaaccgtggacgagaagtccatcatcgagcccatcgtgaacttcgccctgaagaaaaagggcaacgtcacctactacgaggccgaggccaccagcatcaaccccgaccggaacaccgtgaccatcaagagcctgagcgccgtgtcccagctgtaccagcccgagaaccacctgggcctgcaccaggccgagcccgccgagattaagtacgactacctgatcagcgccgtgggcgccgagcccaacacctttggaatccccggcgtgaccgactacggccacttcctgaaagagatccccaacagcctggaaatccggcggaccttcgccgccaacctggaaaaggccaacctgctgcctaagggcgaccccgagcggagaaggctgctgagcatcgtggtcgtgggcggaggccccacaggcgtggaagctgctggcgagctgcaggactacgtgcaccaggacctgcggaagttcctgcccgccctggccgaggaagtgcagattcacctggtggaagccctgcccatcgtgctgaacatgttcgagaagaagctgagcagctacgcccagagccacctggaaaacacctccatcaaggtgcacctgagaaccgccgtggccaaggtggaagagaagcagctgctggccaagaccaagcacgaggacggcaagattaccgaggaaaccatcccctacggcaccctgatttgggccaccggcaacaaggccagacccgtgatcaccgacctgttcaagaagatccccgagcagaacagcagcaagcggggcctggccgtgaacgacttcctgcaggtcaaaggcagcaacaacatcttcgccatcggcgacaacgcctttgccggcctgcctcctacagcccaggtggcccaccaggaagccgagtacctggccaagaacttcgacaagatggcccagatccccaatttccagaagaacctgtcctcccggaaggataagatcgacctgctgttcgaggaaaacaacttcaagcccttcaagtacaacgacctgggcgccctggcctacctgggcagcgaaagagccattgccaccatcagaagcggcaagcggaccttctacaccggcggaggcctgatgaccttctacctgtggcggatcctgtacctgagcatgatcctgagcgcccgcagcagactgaaggtgttcttcgactggatcaagctggccttcttcaagagggacttcttcaagggcctgtga

SEQ ID NO: 735 - DNA, 1542 bp, Artificial Sequence
  source: /note="Description of Artificial Sequence: Synthetic polynucleotide"
atgctgagcaagaacctgtacagcaacaagcggctgctgaccagcaccaacaccctcgtgcgcttcgccagcaccagatccaccggcgtcgaaaacagcggggctggccccaccagcttcaagaccatgaaggtcatcgacccccagcacagcgacaagcccaacgtgctgatcctgggctctggctggggcgccatcagctttctgaagcacatcgacaccaagaagtacaacgtcagcatcgtgagccccagaagctacttcctgttcacccccctgctgcccagcgcccctgtgggaaccgtggacgagaagtccatcatcgagcccatcgtgaacttcgccctgaagaaaaagggcaacgtcacctactacgaggccgaggccaccagcatcaaccccgaccggaacaccgtgaccatcaagagcctgagcgccgtgtcccagctgtaccagcccgagaaccacctgggcctgcaccaggccgagcccgccgagattaagtacgactacctgatcagcgccgtgggcgccgagcccaacacctttggaatccccggcgtgaccgactacggccacttcctgaaagagatccccaacagcctggaaatccggcggaccttcgccgccaacctggaaaaggccaacctgctgcctaagggcgaccccgagcggagaaggctgctgagcatcgtggtcgtgggcggaggccccacaggcgtggaagctgctggcgagctgcaggactacgtgcaccaggacctgcggaagttcctgcccgccctggccgaggaaatccagattcacctggtggaagccctgcccatcgtgctgaacatgttcgagaagaagctgagcagctacgcccagagccacctggaaaacacctccatcaaggtgcacctgagaaccgccgtggccaaggtggaagagaagcagctgctggccaagaccaagcacgaggacggcaagattaccgaggaaaccatcccctacggcaccctgatttgggccaccggcaacaaggccagacccgtgatcaccgacctgttcaagaagatccccgagcagaacagcagcaagcggggcctggccgtgaacgacttcctgcaggtcaaaggcagcaacaacatcttcgccatcggcgacaacgcctttgccggcctgcctcctacagcccaggtggcccaccaggaagccgagtacctggccaagaacttcgacaagatggcccagatccccaatttccagaagaacctgtcctcccggaaggataagatcgacctgctgttcgaggaaaacaacttcaagcccttcaagtacaacgacctgggcgccctggcctacctgggcagcgaaagagccattgccaccatcagaagcggcaagcggaccttctacaccggcggaggcctgatgaccttctacctgtggcggatcctgtacatgagcatgatcctgagcgcccgcagcagactgaaggtgttcttcgactggatcaagctggccttcttcaagagggacttcttcaagggcctgtga

SEQ ID NO: 736 - DNA, 1542 bp, Artificial Sequence
  source: /note="Description of Artificial Sequence: Synthetic polynucleotide"
atgctgagcaagaacctgtacagcaacaagcggctgctgaccagcaccaacaccctcgtgcgcttcgccagcaccagatccaccggcgtcgaaaacagcggggctggccccaccagcttcaagaccatgaaggtcatcgacccccagcacagcgacaagcccaacgtgctgatcctgggctctggctggggcgccatcagctttctgaagcacatcgacaccaagaagtacaacgtcagcatcgtgagccccagaagctacttcctgttcacccccctgctgcccagcgcccctgtgggaaccgtggacgagaagtccatcatcgagcccatcgtgaacttcgccctgaagaaaaagggcaacgtcacctactacgaggccgaggccaccagcatcaaccccgaccggaacaccgtgaccatcaagagcctgagcgccgtgtcccagctgtaccagcccgagaaccacctgggcctgcaccaggccgagcccgccgagattaagtacgactacctgatcagcgccgtgggcgccgagcccaacacctttggaatccccggcgtgaccgactacggccacttcctgaaagagatccccaacagcctggaaatccggcggaccttcgccgccaacctggaaaaggccaacctgctgcctaagggcgaccccgagcggagaaggctgctgagcatcgtggtcgtgggcggaggccccacaggcgtggaagctgctggcgagctgcaggactacgtgcaccaggacctgcggaagttcctgcccgccctggccgaggaaatccagattcacctggtggaagccctgcccatcgtgctgaacatgttcgagaagaagctgagcagctacgcccagagccacctggaaaacacctccatcaaggtgcacctgagaaccgccgtggccaaggtggaagagaagcagctgctggccaagaccaagcacgaggacggcaagattaccgaggaaaccatcccctacggcaccctgatttgggccaccggcaacaaggccagacccgtgatcaccgacctgttcaagaagatccccgagcagaacagcagcaagcggggcctggccgtgaacgacttcctgcaggtcaaaggcagcaacaacatcttcgccatcggcgacaacgcctttgccggcctgcctcctacagcccaggtggcccaccaggaagccgagtacctggccaagaacttcgacaagatggcccagatccccaatttccagaagaacctgtcctcccggaaggataagatcgacctgctgttcgaggaaaacaacttcaagcccttcaagtacaacgacctgggcgccctggcctacctgggcagcgaaagagccattgccaccatcagaagcggcaagcggaccttctacaccggcggaggcctgatgaccttctacctgtggcggatcatctacctgagcatgatcctgagcgcccgcagcagactgaaggtgttcttcgactggatcaagctggccttcttcaagagggacttcttcaagggcctgtga

SEQ ID NO: 737 - DNA, 1542 bp, Artificial Sequence
  source: /note="Description of Artificial Sequence: Synthetic polynucleotide"
atgctgagcaagaacctgtacagcaacaagcggctgctgaccagcaccaacaccctcgtgcgcttcgccagcaccagatccaccggcgtcgaaaacagcggggctggccccaccagcttcaagaccatgaagatcatcgacccccagcacagcgacaagcccaacgtgctgatcctgggctctggctggggcgccatcagctttctgaagcacatcgacaccaagaagtacaacgtcagcatcgtgagccccagaagctacttcctgttcacccccctgctgcccagcgcccctgtgggaaccgtggacgagaagtccatcatcgagcccatcgtgaacttcgccctgaagaaaaagggcaacgtcacctactacgaggccgaggccaccagcatcaaccccgaccggaacaccgtgaccatcaagagcctgagcgccgtgtcccagctgtaccagcccgagaaccacctgggcctgcaccaggccgagcccgccgagattaagtacgactacctgatcagcgccgtgggcgccgagcccaacacctttggaatccccggcgtgaccgactacggccacttcctgaaagagatccccaacagcctggaaatccggcggaccttcgccgccaacctggaaaaggccaacctgctgcctaagggcgaccccgagcggagaaggctgctgagcatcgtggtcgtgggcggaggccccacaggcgtggaagctgctggcgagctgcaggactacgtgcaccaggacctgcggaagttcctgcccgccctggccgaggaaatccagattcacctggtggaagccctgcccatcgtgctgaacatgttcgagaagaagctgagcagctacgcccagagccacctggaaaacacctccatcaaggtgcacctgagaaccgccgtggccaaggtggaagagaagcagctgctggccaagaccaagcacgaggacggcaagattaccgaggaaaccatcccctacggcaccctgatttgggccaccggcaacaaggccagacccgtgatcaccgacctgttcaagaagatccccgagcagaacagcagcaagcggggcctggccgtgaacgacttcctgcaggtcaaaggcagcaacaacatcttcgccatcggcgacaacgcctttgccggcctgcctcctacagcccaggtggcccaccaggaagccgagtacctggccaagaacttcgacaagatggcccagatccccaatttccagaagaacctgtcctcccggaaggataagatcgacctgctgttcgaggaaaacaacttcaagcccttcaagtacaacgacctgggcgccctggcctacctgggcagcgaaagagccattgccaccatcagaagcggcaagcggaccttctacaccggcggaggcctgatgaccttctacctgtggcggatcctgtacctgagcatgatcctgagcgcccgcagcagactgaaggtgttcttcgactggatcaagctggccttcttcaagagggacttcttcaagggcctgtga

SEQ ID NO: 738 - DNA, 1542 bp, Artificial Sequence
  source: /note="Description of Artificial Sequence: Synthetic polynucleotide"
atgctgagcaagaacctgtacagcaacaagcggctgctgaccagcaccaacaccctcgtgcgcttcgccagcaccagatccaccggcgtcgaaaacagcggggctggccccaccagcttcaagaccatgaaggtcatcgacccccagcacagcgacaagcccaacgtgctgatcctgggctctggctggggcgccatcagctttctgaagcacatcgacaccaagaagtacaacgtcagcatcgtgagccccagaagctacttcctgttcacccccctgctgcccagcgcccctgtgggaaccgtggacgagaagtccatcatcgagcccatcgtgaacttcgccctgaagaaaaagggcaacgtcacctactacgaggccgaggccaccagcatcaaccccgaccggaacaccgtgaccatcaagagcctgagcgccgtgtcccagctgtaccagcccgagaaccacctgggcctgcaccaggccgagcccgccgagattaagtacgactacctgatcagcgccgtgggcgccgagcccaacacctttggaatccccggcgtgaccgactacggccacttcctgaaagagatccccaacagcctggaaatccggcggaccttcgccgccaacctggaaaaggccaacctgctgcctaagggcgaccccgagcggagaaggctgctgagcatcgtggtcgtgggcggaggccccacaggcgtggaagctgctggcgagctgcaggactacgtgcaccaggacctgcggaagttcctgcccgccctggccgaggaagtgcagattcacctggtggaagccctgcccatcgtgctgaacatgttcgagaagaagctgagcagctacgcccagagccacctggaaaacacctccatcaaggtgcacctgagaaccgccgtggccaaggtggaagagaagcagctgctggccaagaccaagcacgaggacggcaagattaccgaggaaaccatcccctacggcaccctgatttgggccaccggcaacaaggccagacccgtgatcaccgacctgttcaagaagatccccgagcagaacagcagcaagcggggcctggccgtgaacgacttcctgcaggtcaaaggcagcaacaacatcttcgccatcggcgacaacgcctttgccggcctgcctcctacagcccaggtggcccaccaggaagccgagtacctggccaagaacttcgacaagatggcccagatccccaatttccagaagaacctgtcctcccggaaggataagatcgacctgctgttcgaggaaaacaacttcaagcccttcaagtacaacgacctgggcgccctggcctacctgggcagcgaaagagccattgccaccatcagaagcggcaagcggaccttctacaccggcggaggcctgatgaccttctacctgtggcggatcatctacatgagcatgatcctgagcgcccgcagcagactgaaggtgttcttcgactggatcaagctggccttcttcaagagggacttcttcaagggcctgtga

SEQ ID NO: 739 - DNA, 1542 bp, Artificial Sequence
  source: /note="Description of Artificial Sequence: Synthetic polynucleotide"
atgctgagcaagaacctgtacagcaacaagcggctgctgaccagcaccaacaccctcgtgcgcttcgccagcaccagatccaccggcgtcgaaaacagcggggctggccccaccagcttcaagaccatgaagatcatcgacccccagcacagcgacaagcccaacgtgctgatcctgggctctggctggggcgccatcagctttctgaagcacatcgacaccaagaagtacaacgtcagcatcgtgagccccagaagctacttcctgttcacccccctgctgcccagcgcccctgtgggaaccgtggacgagaagtccatcatcgagcccatcgtgaacttcgccctgaagaaaaagggcaacgtcacctactacgaggccgaggccaccagcatcaaccccgaccggaacaccgtgaccatcaagagcctgagcgccgtgtcccagctgtaccagcccgagaaccacctgggcctgcaccaggccgagcccgccgagattaagtacgactacctgatcagcgccgtgggcgccgagcccaacacctttggaatccccggcgtgaccgactacggccacttcctgaaagagatccccaacagcctggaaatccggcggaccttcgccgccaacctggaaaaggccaacctgctgcctaagggcgaccccgagcggagaaggctgctgagcatcgtggtcgtgggcggaggccccacaggcgtggaagctgctggcgagctgcaggactacgtgcaccaggacctgcggaagttcctgcccgccctggccgaggaagtgcagattcacctggtggaagccctgcccatcgtgctgaacatgttcgagaagaagctgagcagctacgcccagagccacctggaaaacacctccatcaaggtgcacctgagaaccgccgtggccaaggtggaagagaagcagctgctggccaagaccaagcacgaggacggcaagattaccgaggaaaccatcccctacggcaccctgatttgggccaccggcaacaaggccagacccgtgatcaccgacctgttcaagaagatccccgagcagaacagcagcaagcggggcctggccgtgaacgacttcctgcaggtcaaaggcagcaacaacatcttcgccatcggcgacaacgcctttgccggcctgcctcctacagcccaggtggcccaccaggaagccgagtacctggccaagaacttcgacaagatggcccagatccccaatttccagaagaacctgtcctcccggaaggataagatcgacctgctgttcgaggaaaacaacttcaagcccttcaagtacaacgacctgggcgccctggcctacctgggcagcgaaagagccattgccaccatcagaagcggcaagcggaccttctacaccggcggaggcctgatgaccttctacctgtggcggatcctgtacatgagcatgatcctgagcgcccgcagcagactgaaggtgttcttcgactggatcaagctggccttcttcaagagggacttcttcaagggcctgtga

SEQ ID NO: 740 - DNA, 1542 bp, Artificial Sequence
  source: /note="Description of Artificial Sequence: Synthetic polynucleotide"
atgctgagcaagaacctgtacagcaacaagcggctgctgaccagcaccaacaccctcgtgcgcttcgccagcaccagatccaccggcgtcgaaaacagcggggctggccccaccagcttcaagaccatgaagatcatcgacccccagcacagcgacaagcccaacgtgctgatcctgggctctggctggggcgccatcagctttctgaagcacatcgacaccaagaagtacaacgtcagcatcgtgagccccagaagctacttcctgttcacccccctgctgcccagcgcccctgtgggaaccgtggacgagaagtccatcatcgagcccatcgtgaacttcgccctgaagaaaaagggcaacgtcacctactacgaggccgaggccaccagcatcaaccccgaccggaacaccgtgaccatcaagagcctgagcgccgtgtcccagctgtaccagcccgagaaccacctgggcctgcaccaggccgagcccgccgagattaagtacgactacctgatcagcgccgtgggcgccgagcccaacacctttggaatccccggcgtgaccgactacggccacttcctgaaagagatccccaacagcctggaaatccggcggaccttcgccgccaacctggaaaaggccaacctgctgcctaagggcgaccccgagcggagaaggctgctgagcatcgtggtcgtgggcggaggccccacaggcgtggaagctgctggcgagctgcaggactacgtgcaccaggacctgcggaagttcctgcccgccctggccgaggaagtgcagattcacctggtggaagccctgcccatcgtgctgaacatgttcgagaagaagctgagcagctacgcccagagccacctggaaaacacctccatcaaggtgcacctgagaaccgccgtggccaaggtggaagagaagcagctgctggccaagaccaagcacgaggacggcaagattaccgaggaaaccatcccctacggcaccctgatttgggccaccggcaacaaggccagacccgtgatcaccgacctgttcaagaagatccccgagcagaacagcagcaagcggggcctggccgtgaacgacttcctgcaggtcaaaggcagcaacaacatcttcgccatcggcgacaacgcctttgccggcctgcctcctacagcccaggtggcccaccaggaagccgagtacctggccaagaacttcgacaagatggcccagatccccaatttccagaagaacctgtcctcccggaaggataagatcgacctgctgttcgaggaaaacaacttcaagcccttcaagtacaacgacctgggcgccctggcctacctgggcagcgaaagagccattgccaccatcagaagcggcaagcggaccttctacaccggcggaggcctgatgaccttctacctgtggcggatcatctacctgagcatgatcctgagcgcccgcagcagactgaaggtgttcttcgactggatcaagctggccttcttcaagagggacttcttcaagggcctgtga

SEQ ID NO: 741 - DNA, 1542 bp, Artificial Sequence
  source: /note="Description of Artificial Sequence: Synthetic polynucleotide"
atgctgagcaagaacctgtacagcaacaagcggctgctgaccagcaccaacaccctcgtgcgcttcgccagcaccagatccaccggcgtcgaaaacagcggggctggccccaccagcttcaagaccatgaaggtcatcgacccccagcacagcgacaagcccaacgtgctgatcctgggctctggctggggcgccatcagctttctgaagcacatcgacaccaagaagtacaacgtcagcatcatcagccccagaagctacttcatctacacccccctgctgcccagcgcccctgtgggaaccgtggacgagaagtccatcatcgagcccatcgtgaacttcgccctgaagaaaaagggcaacgtcacctactacgaggccgaggccaccagcatcaaccccgaccggaacaccgtgaccatcaagagcctgagcgccgtgtcccagctgtaccagcccgagaaccacctgggcctgcaccaggccgagcccgccgagattaagtacgactacctgatcagcgccgtgggcgccgagcccaacacctttggaatccccggcgtgaccgactacggccacttcctgaaagagatccccaacagcctggaaatccggcggaccttcgccgccaacctggaaaaggccaacctgctgcctaagggcgaccccgagcggagaaggctgctgagcatcgtggtcgtgggcggaggccccacaggcgtggaagctgctggcgagctgcaggactacgtgcaccaggacctgcggaagttcctgcccgccctggccgaggaaatccagattcacctggtggaagccctgcccatcgtgctgaacatgttcgagaagaagctgagcagctacgcccagagccacctggaaaacacctccatcaaggtgcacctgagaaccgccgtggccaaggtggaagagaagcagctgctggccaagaccaagcacgaggacggcaagattaccgaggaaaccatcccctacggcaccctgatttgggccaccggcaacaaggccagacccgtgatcaccgacctgttcaagaagatccccgagcagaacagcagcaagcggggcctggccgtgaacgacttcctgcaggtcaaaggcagcaacaacatcttcgccatcggcgacaacgcctttgccggcctgcctcctacagcccaggtggcccaccaggaagccgagtacctggccaagaacttcgacaagatggcccagatccccaatttccagaagaacctgtcctcccggaaggataagatcgacctgctgttcgaggaaaacaacttcaagcccttcaagtacaacgacctgggcgccctggcctacctgggcagcgaaagagccattgccaccatcagaagcggcaagcggaccttctacaccggcggaggcctgatgaccttctacctgtggcggatcctgtacctgagcatgatcctgagcgcccgcagcagactgaaggtgttcttcgactggatcaagctggccttcttcaagagggacttcttcaagggcctgtga

SEQ ID NO: 742 - DNA, 1542 bp, Artificial Sequence
  source: /note="Description of Artificial Sequence: Synthetic polynucleotide"
atgctgagcaagaacctgtacagcaacaagcggctgctgaccagcaccaacaccctcgtgcgcttcgccagcaccagatccaccggcgtcgaaaacagcggggctggccccaccagcttcaagaccatgaaggtcatcgacccccagcacagcgacaagcccaacgtgctgatcctgggctctggctggggcgccatcagctttctgaagcacatcgacaccaagaagtacaacgtcagcatcatcagccccagaagctacttcatctacacccccctgctgcccagcgcccctgtgggaaccgtggacgagaagtccatcatcgagcccatcgtgaacttcgccctgaagaaaaagggcaacgtcacctactacgaggccgaggccaccagcatcaaccccgaccggaacaccgtgaccatcaagagcctgagcgccgtgtcccagctgtaccagcccgagaaccacctgggcctgcaccaggccgagcccgccgagattaagtacgactacctgatcagcgccgtgggcgccgagcccaacacctttggaatccccggcgtgaccgactacggccacttcctgaaagagatccccaacagcctggaaatccggcggaccttcgccgccaacctggaaaaggccaacctgctgcctaagggcgaccccgagcggagaaggctgctgagcatcgtggtcgtgggcggaggccccacaggcgtggaagctgctggcgagctgcaggactacgtgcaccaggacctgcggaagttcctgcccgccctggccgaggaagtgcagattcacctggtggaagccctgcccatcgtgctgaacatgttcgagaagaagctgagcagctacgcccagagccacctggaaaacacctccatcaaggtgcacctgagaaccgccgtggccaaggtggaagagaagcagctgctggccaagaccaagcacgaggacggcaagattaccgaggaaaccatcccctacggcaccctgatttgggccaccggcaacaaggccagacccgtgatcaccgacctgttcaagaagatccccgagcagaacagcagcaagcggggcctggccgtgaacgacttcctgcaggtcaaaggcagcaacaacatcttcgccatcggcgacaacgcctttgccggcctgcctcctacagcccaggtggcccaccaggaagccgagtacctggccaagaacttcgacaagatggcccagatccccaatttccagaagaacctgtcctcccggaaggataagatcgacctgctgttcgaggaaaacaacttcaagcccttcaagtacaacgacctgggcgccctggcctacctgggcagcgaaagagccattgccaccatcagaagcggcaagcggaccttctacaccggcggaggcctgatgaccttctacctgtggcggatcctgtacatgagcatgatcctgagcgcccgcagcagactgaaggtgttcttcgactggatcaagctggccttcttcaagagggacttcttcaagggcctgtga

SEQ ID NO: 743 - DNA, 1542 bp, Artificial Sequence
  source: /note="Description of Artificial Sequence: Synthetic polynucleotide"
atgctgagcaagaacctgtacagcaacaagcggctgctgaccagcaccaacaccctcgtgcgcttcgccagcaccagatccaccggcgtcgaaaacagcggggctggccccaccagcttcaagaccatgaaggtcatcgacccccagcacagcgacaagcccaacgtgctgatcctgggctctggctggggcgccatcagctttctgaagcacatcgacaccaagaagtacaacgtcagcatcatcagccccagaagctacttcatctacacccccctgctgcccagcgcccctgtgggaaccgtggacgagaagtccatcatcgagcccatcgtgaacttcgccctgaagaaaaagggcaacgtcacctactacgaggccgaggccaccagcatcaaccccgaccggaacaccgtgaccatcaagagcctgagcgccgtgtcccagctgtaccagcccgagaaccacctgggcctgcaccaggccgagcccgccgagattaagtacgactacctgatcagcgccgtgggcgccgagcccaacacctttggaatccccggcgtgaccgactacggccacttcctgaaagagatccccaacagcctggaaatccggcggaccttcgccgccaacctggaaaaggccaacctgctgcctaagggcgaccccgagcggagaaggctgctgagcatcgtggtcgtgggcggaggccccacaggcgtggaagctgctggcgagctgcaggactacgtgcaccaggacctgcggaagttcctgcccgccctggccgaggaagtgcagattcacctggtggaagccctgcccatcgtgctgaacatgttcgagaagaagctgagcagctacgcccagagccacctggaaaacacctccatcaaggtgcacctgagaaccgccgtggccaaggtggaagagaagcagctgctggccaagaccaagcacgaggacggcaagattaccgaggaaaccatcccctacggcaccctgatttgggccaccggcaacaaggccagacccgtgatcaccgacctgttcaagaagatccccgagcagaacagcagcaagcggggcctggccgtgaacgacttcctgcaggtcaaaggcagcaacaacatcttcgccatcggcgacaacgcctttgccggcctgcctcctacagcccaggtggcccaccaggaagccgagtacctggccaagaacttcgacaagatggcccagatccccaatttccagaagaacctgtcctcccggaaggataagatcgacctgctgttcgaggaaaacaacttcaagcccttcaagtacaacgacctgggcgccctggcctacctgggcagcgaaagagccattgccaccatcagaagcggcaagcggaccttctacaccggcggaggcctgatgaccttctacctgtggcggatcatctacctgagcatgatcctgagcgcccgcagcagactgaaggtgttcttcgactggatcaagctggccttcttcaagagggacttcttcaagggcctgtga

SEQ ID NO: 744 - DNA, 1542 bp, Artificial Sequence
  source: /note="Description of Artificial Sequence: Synthetic polynucleotide"
atgctgagcaagaacctgtacagcaacaagcggctgctgaccagcaccaacaccctcgtgcgcttcgccagcaccagatccaccggcgtcgaaaacagcggggctggccccaccagcttcaagaccatgaagatcatcgacccccagcacagcgacaagcccaacgtgctgatcctgggctctggctggggcgccatcagctttctgaagcacatcgacaccaagaagtacaacgtcagcatcatcagccccagaagctacttcatctacacccccctgctgcccagcgcccctgtgggaaccgtggacgagaagtccatcatcgagcccatcgtgaacttcgccctgaagaaaaagggcaacgtcacctactacgaggccgaggccaccagcatcaaccccgaccggaacaccgtgaccatcaagagcctgagcgccgtgtcccagctgtaccagcccgagaaccacctgggcctgcaccaggccgagcccgccgagattaagtacgactacctgatcagcgccgtgggcgccgagcccaacacctttggaatccccggcgtgaccgactacggccacttcctgaaagagatccccaacagcctggaaatccggcggaccttcgccgccaacctggaaaaggccaacctgctgcctaagggcgaccccgagcggagaaggctgctgagcatcgtggtcgtgggcggaggccccacaggcgtggaagctgctggcgagctgcaggactacgtgcaccaggacctgcggaagttcctgcccgccctggccgaggaagtgcagattcacctggtggaagccctgcccatcgtgctgaacatgttcgagaagaagctgagcagctacgcccagagccacctggaaaacacctccatcaaggtgcacctgagaaccgccgtggccaaggtggaagagaagcagctgctggccaagaccaagcacgaggacggcaagattaccgaggaaaccatcccctacggcaccctgatttgggccaccggcaacaaggccagacccgtgatcaccgacctgttcaagaagatccccgagcagaacagcagcaagcggggcctggccgtgaacgacttcctgcaggtcaaaggcagcaacaacatcttcgccatcggcgacaacgcctttgccggcctgcctcctacagcccaggtggcccaccaggaagccgagtacctggccaagaacttcgacaagatggcccagatccccaatttccagaagaacctgtcctcccggaaggataagatcgacctgctgttcgaggaaaacaacttcaagcccttcaagtacaacgacctgggcgccctggcctacctgggcagcgaaagagccattgccaccatcagaagcggcaagcggaccttctacaccggcggaggcctgatgaccttctacctgtggcggatcctgtacctgagcatgatcctgagcgcccgcagcagactgaaggtgttcttcgactggatcaagctggccttcttcaagagggacttcttcaagggcctgtga

SEQ ID NO: 745 - DNA, 1542 bp, Artificial Sequence
  source: /note="Description of Artificial Sequence: Synthetic polynucleotide"
atgctgagcaagaacctgtacagcaacaagcggctgctgaccagcaccaacaccctcgtgcgcttcgccagcaccagatccaccggcgtcgaaaacagcggggctggccccaccagcttcaagaccatgaaggtcatcgacccccagcacagcgacaagcccaacgtgctgatcctgggctctggctggggcgccatcagctttctgaagcacatcgacaccaagaagtacaacgtcagcatcatcagccccagaagctacttcctgtacacccccctgctgcccagcgcccctgtgggaaccgtggacgagaagtccatcatcgagcccatcgtgaacttcgccctgaagaaaaagggcaacgtcacctactacgaggccgaggccaccagcatcaaccccgaccggaacaccgtgaccatcaagagcctgagcgccgtgtcccagctgtaccagcccgagaaccacctgggcctgcaccaggccgagcccgccgagattaagtacgactacctgatcagcgccgtgggcgccgagcccaacacctttggaatccccggcgtgaccgactacggccacttcctgaaagagatccccaacagcctggaaatccggcggaccttcgccgccaacctggaaaaggccaacctgctgcctaagggcgaccccgagcggagaaggctgctgagcatcgtggtcgtgggcggaggccccacaggcgtggaagctgctggcgagctgcaggactacgtgcaccaggacctgcggaagttcctgcccgccctggccgaggaaatccagattcacctggtggaagccctgcccatcgtgctgaacatgttcgagaagaagctgagcagctacgcccagagccacctggaaaacacctccatcaaggtgcacctgagaaccgccgtggccaaggtggaagagaagcagctgctggccaagaccaagcacgaggacggcaagattaccgaggaaaccatcccctacggcaccctgatttgggccaccggcaacaaggccagacccgtgatcaccgacctgttcaagaagatccccgagcagaacagcagcaagcggggcctggccgtgaacgacttcctgcaggtcaaaggcagcaacaacatcttcgccatcggcgacaacgcctttgccggcctgcctcctacagcccaggtggcccaccaggaagccgagtacctggccaagaacttcgacaagatggcccagatccccaatttccagaagaacctgtcctcccggaaggataagatcgacctgctgttcgaggaaaacaacttcaagcccttcaagtacaacgacctgggcgccctggcctacctgggcagcgaaagagccattgccaccatcagaagcggcaagcggaccttctacaccggcggaggcctgatgaccttctacctgtggcggatcctgtacatgagcatgatcctgagcgcccgcagcagactgaaggtgttcttcgactggatcaagctggccttcttcaagagggacttcttcaagggcctgtga

SEQ ID NO: 746 - DNA, 1542 bp, Artificial Sequence
  source: /note="Description of Artificial Sequence: Synthetic polynucleotide"
atgctgagcaagaacctgtacagcaacaagcggctgctgaccagcaccaacaccctcgtgcgcttcgccagcaccagatccaccggcgtcgaaaacagcggggctggccccaccagcttcaagaccatgaaggtcatcgacccccagcacagcgacaagcccaacgtgctgatcctgggctctggctggggcgccatcagctttctgaagcacatcgacaccaagaagtacaacgtcagcatcatcagccccagaagctacttcctgtacacccccctgctgcccagcgcccctgtgggaaccgtggacgagaagtccatcatcgagcccatcgtgaacttcgccctgaagaaaaagggcaacgtcacctactacgaggccgaggccaccagcatcaaccccgaccggaacaccgtgaccatcaagagcctgagcgccgtgtcccagctgtaccagcccgagaaccacctgggcctgcaccaggccgagcccgccgagattaagtacgactacctgatcagcgccgtgggcgccgagcccaacacctttggaatccccggcgtgaccgactacggccacttcctgaaagagatccccaacagcctggaaatccggcggaccttcgccgccaacctggaaaaggccaacctgctgcctaagggcgaccccgagcggagaaggctgctgagcatcgtggtcgtgggcggaggccccacaggcgtggaagctgctggcgagctgcaggactacgtgcaccaggacctgcggaagttcctgcccgccctggccgaggaaatccagattcacctggtggaagccctgcccatcgtgctgaacatgttcgagaagaagctgagcagctacgcccagagccacctggaaaacacctccatcaaggtgcacctgagaaccgccgtggccaaggtggaagagaagcagctgctggccaagaccaagcacgaggacggcaagattaccgaggaaaccatcccctacggcaccctgatttgggccaccggcaacaaggccagacccgtgatcaccgacctgttcaagaagatccccgagcagaacagcagcaagcggggcctggccgtgaacgacttcctgcaggtcaaaggcagcaacaacatcttcgccatcggcgacaacgcctttgccggcctgcctcctacagcccaggtggcccaccaggaagccgagtacctggccaagaacttcgacaagatggcccagatccccaatttccagaagaacctgtcctcccggaaggataagatcgacctgctgttcgaggaaaacaacttcaagcccttcaagtacaacgacctgggcgccctggcctacctgggcagcgaaagagccattgccaccatcagaagcggcaagcggaccttctacaccggcggaggcctgatgaccttctacctgtggcggatcatctacctgagcatgatcctgagcgcccgcagcagactgaaggtgttcttcgactggatcaagctggccttcttcaagagggacttcttcaagggcctgtga

SEQ ID NO: 747 - DNA, 1542 bp, Artificial Sequence
  source: /note="Description of Artificial Sequence: Synthetic polynucleotide"
atgctgagcaagaacctgtacagcaacaagcggctgctgaccagcaccaacaccctcgtgcgcttcgccagcaccagatccaccggcgtcgaaaacagcggggctggccccaccagcttcaagaccatgaagatcatcgacccccagcacagcgacaagcccaacgtgctgatcctgggctctggctggggcgccatcagctttctgaagcacatcgacaccaagaagtacaacgtcagcatcatcagccccagaagctacttcctgtacacccccctgctgcccagcgcccctgtgggaaccgtggacgagaagtccatcatcgagcccatcgtgaacttcgccctgaagaaaaagggcaacgtcacctactacgaggccgaggccaccagcatcaaccccgaccggaacaccgtgaccatcaagagcctgagcgccgtgtcccagctgtaccagcccgagaaccacctgggcctgcaccaggccgagcccgccgagattaagtacgactacctgatcagcgccgtgggcgccgagcccaacacctttggaatccccggcgtgaccgactacggccacttcctgaaagagatccccaacagcctggaaatccggcggaccttcgccgccaacctggaaaaggccaacctgctgcctaagggcgaccccgagcggagaaggctgctgagcatcgtggtcgtgggcggaggccccacaggcgtggaagctgctggcgagctgcaggactacgtgcaccaggacctgcggaagttcctgcccgccctggccgaggaaatccagattcacctggtggaagccctgcccatcgtgctgaacatgttcgagaagaagctgagcagctacgcccagagccacctggaaaacacctccatcaaggtgcacctgagaaccgccgtggccaaggtggaagagaagcagctgctggccaagaccaagcacgaggacggcaagattaccgaggaaaccatcccctacggcaccctgatttgggccaccggcaacaaggccagacccgtgatcaccgacctgttcaagaagatccccgagcagaacagcagcaagcggggcctggccgtgaacgacttcctgcaggtcaaaggcagcaacaacatcttcgccatcggcgacaacgcctttgccggcctgcctcctacagcccaggtggcccaccaggaagccgagtacctggccaagaacttcgacaagatggcccagatccccaatttccagaagaacctgtcctcccggaaggataagatcgacctgctgttcgaggaaaacaacttcaagcccttcaagtacaacgacctgggcgccctggcctacctgggcagcgaaagagccattgccaccatcagaagcggcaagcggaccttctacaccggcggaggcctgatgaccttctacctgtggcggatcctgtacctgagcatgatcctgagcgcccgcagcagactgaaggtgttcttcgactggatcaagctggccttcttcaagagggacttcttcaagggcctgtga

SEQ ID NO: 748 - DNA, 1542 bp, Artificial Sequence
  source: /note="Description of Artificial Sequence: Synthetic polynucleotide"
atgctgagcaagaacctgtacagcaacaagcggctgctgaccagcaccaacaccctcgtgcgcttcgccagcaccagatccaccggcgtcgaaaacagcggggctggccccaccagcttcaagaccatgaaggtcatcgacccccagcacagcgacaagcccaacgtgctgatcctgggctctggctggggcgccatcagctttctgaagcacatcgacaccaagaagtacaacgtcagcatcatcagccccagaagctacttcctgtacacccccctgctgcccagcgcccctgtgggaaccgtggacgagaagtccatcatcgagcccatcgtgaacttcgccctgaagaaaaagggcaacgtcacctactacgaggccgaggccaccagcatcaaccccgaccggaacaccgtgaccatcaagagcctgagcgccgtgtcccagctgtaccagcccgagaaccacctgggcctgcaccaggccgagcccgccgagattaagtacgactacctgatcagcgccgtgggcgccgagcccaacacctttggaatccccggcgtgaccgactacggccacttcctgaaagagatccccaacagcctggaaatccggcggaccttcgccgccaacctggaaaaggccaacctgctgcctaagggcgaccccgagcggagaaggctgctgagcatcgtggtcgtgggcggaggccccacaggcgtggaagctgctggcgagctgcaggactacgtgcaccaggacctgcggaagttcctgcccgccctggccgaggaagtgcagattcacctggtggaagccctgcccatcgtgctgaacatgttcgagaagaagctgagcagctacgcccagagccacctggaaaacacctccatcaaggtgcacctgagaaccgccgtggccaaggtggaagagaagcagctgctggccaagaccaagcacgaggacggcaagattaccgaggaaaccatcccctacggcaccctgatttgggccaccggcaacaaggccagacccgtgatcaccgacctgttcaagaagatccccgagcagaacagcagcaagcggggcctggccgtgaacgacttcctgcaggtcaaaggcagcaacaacatcttcgccatcggcgacaacgcctttgccggcctgcctcctacagcccaggtggcccaccaggaagccgagtacctggccaagaacttcgacaagatggcccagatccccaatttccagaagaacctgtcctcccggaaggataagatcgacctgctgttcgaggaaaacaacttcaagcccttcaagtacaacgacctgggcgccctggcctacctgggcagcgaaagagccattgccaccatcagaagcggcaagcggaccttctacaccggcggaggcctgatgaccttctacctgtggcggatcatctacatgagcatgatcctgagcgcccgcagcagactgaaggtgttcttcgactggatcaagctggccttcttcaagagggacttcttcaagggcctgtga

SEQ ID NO: 749 - DNA, 1542 bp, Artificial Sequence
  source: /note="Description of Artificial Sequence: Synthetic polynucleotide"
atgctgagcaagaacctgtacagcaacaagcggctgctgaccagcaccaacaccctcgtgcgcttcgccagcaccagatccaccggcgtcgaaaacagcggggctggccccaccagcttcaagaccatgaagatcatcgacccccagcacagcgacaagcccaacgtgctgatcctgggctctggctggggcgccatcagctttctgaagcacatcgacaccaagaagtacaacgtcagcatcatcagccccagaagctacttcctgtacacccccctgctgcccagcgcccctgtgggaaccgtggacgagaagtccatcatcgagcccatcgtgaacttcgccctgaagaaaaagggcaacgtcacctactacgaggccgaggccaccagcatcaaccccgaccggaacaccgtgaccatcaagagcctgagcgccgtgtcccagctgtaccagcccgagaaccacctgggcctgcaccaggccgagcccgccgagattaagtacgactacctgatcagcgccgtgggcgccgagcccaacacctttggaatccccggcgtgaccgactacggccacttcctgaaagagatccccaacagcctggaaatccggcggaccttcgccgccaacctggaaaaggccaacctgctgcctaagggcgaccccgagcggagaaggctgctgagcatcgtggtcgtgggcggaggccccacaggcgtggaagctgctggcgagctgcaggactacgtgcaccaggacctgcggaagttcctgcccgccctggccgaggaagtgcagattcacctggtggaagccctgcccatcgtgctgaacatgttcgagaagaagctgagcagctacgcccagagccacctggaaaacacctccatcaaggtgcacctgagaaccgccgtggccaaggtggaagagaagcagctgctggccaagaccaagcacgaggacggcaagattaccgaggaaaccatcccctacggcaccctgatttgggccaccggcaacaaggccagacccgtgatcaccgacctgttcaagaagatccccgagcagaacagcagcaagcggggcctggccgtgaacgacttcctgcaggtcaaaggcagcaacaacatcttcgccatcggcgacaacgcctttgccggcctgcctcctacagcccaggtggcccaccaggaagccgagtacctggccaagaacttcgacaagatggcccagatccccaatttccagaagaacctgtcctcccggaaggataagatcgacctgctgttcgaggaaaacaacttcaagcccttcaagtacaacgacctgggcgccctggcctacctgggcagcgaaagagccattgccaccatcagaagcggcaagcggaccttctacaccggcggaggcctgatgaccttctacctgtggcggatcctgtacatgagcatgatcctgagcgcccgcagcagactgaaggtgttcttcgactggatcaagctggccttcttcaagagggacttcttcaagggcctgtga

SEQ ID NO: 750 - DNA, 1542 bp, Artificial Sequence
  source: /note="Description of Artificial Sequence: Synthetic polynucleotide"
atgctgagcaagaacctgtacagcaacaagcggctgctgaccagcaccaacaccctcgtgcgcttcgccagcaccagatccaccggcgtcgaaaacagcggggctggccccaccagcttcaagaccatgaagatcatcgacccccagcacagcgacaagcccaacgtgctgatcctgggctctggctggggcgccatcagctttctgaagcacatcgacaccaagaagtacaacgtcagcatcatcagccccagaagctacttcctgtacacccccctgctgcccagcgcccctgtgggaaccgtggacgagaagtccatcatcgagcccatcgtgaacttcgccctgaagaaaaagggcaacgtcacctactacgaggccgaggccaccagcatcaaccccgaccggaacaccgtgaccatcaagagcctgagcgccgtgtcccagctgtaccagcccgagaaccacctgggcctgcaccaggccgagcccgccgagattaagtacgactacctgatcagcgccgtgggcgccgagcccaacacctttggaatccccggcgtgaccgactacggccacttcctgaaagagatccccaacagcctggaaatccggcggaccttcgccgccaacctggaaaaggccaacctgctgcctaagggcgaccccgagcggagaaggctgctgagcatcgtggtcgtgggcggaggccccacaggcgtggaagctgctggcgagctgcaggactacgtgcaccaggacctgcggaagttcctgcccgccctggccgaggaagtgcagattcacctggtggaagccctgcccatcgtgctgaacatgttcgagaagaagctgagcagctacgcccagagccacctggaaaacacctccatcaaggtgcacctgagaaccgccgtggccaaggtggaagagaagcagctgctggccaagaccaagcacgaggacggcaagattaccgaggaaaccatcccctacggcaccctgatttgggccaccggcaacaaggccagacccgtgatcaccgacctgttcaagaagatccccgagcagaacagcagcaagcggggcctggccgtgaacgacttcctgcaggtcaaaggcagcaacaacatcttcgccatcggcgacaacgcctttgccggcctgcctcctacagcccaggtggcccaccaggaagccgagtacctggccaagaacttcgacaagatggcccagatccccaatttccagaagaacctgtcctcccggaaggataagatcgacctgctgttcgaggaaaacaacttcaagcccttcaagtacaacgacctgggcgccctggcctacctgggcagcgaaagagccattgccaccatcagaagcggcaagcggaccttctacaccggcggaggcctgatgaccttctacctgtggcggatcatctacctgagcatgatcctgagcgcccgcagcagactgaaggtgttcttcgactggatcaagctggccttcttcaagagggacttcttcaagggcctgtga

SEQ ID NO: 751 - DNA, 1542 bp, Artificial Sequence
  source: /note="Description of Artificial Sequence: Synthetic polynucleotide"
atgctgagcaagaacctgtacagcaacaagcggctgctgaccagcaccaacaccctcgtgcgcttcgccagcaccagatccaccggcgtcgaaaacagcggggctggccccaccagcttcaagaccatgaaggtcatcgacccccagcacagcgacaagcccaacgtgctgatcctgggctctggctggggcgccatcagctttctgaagcacatcgacaccaagaagtacaacgtcagcatcatcagccccagaagctacttcatcttcacccccctgctgcccagcgcccctgtgggaaccgtggacgagaagtccatcatcgagcccatcgtgaacttcgccctgaagaaaaagggcaacgtcacctactacgaggccgaggccaccagcatcaaccccgaccggaacaccgtgaccatcaagagcctgagcgccgtgtcccagctgtaccagcccgagaaccacctgggcctgcaccaggccgagcccgccgagattaagtacgactacctgatcagcgccgtgggcgccgagcccaacacctttggaatccccggcgtgaccgactacggccacttcctgaaagagatccccaacagcctggaaatccggcggaccttcgccgccaacctggaaaaggccaacctgctgcctaagggcgaccccgagcggagaaggctgctgagcatcgtggtcgtgggcggaggccccacaggcgtggaagctgctggcgagctgcaggactacgtgcaccaggacctgcggaagttcctgcccgccctggccgaggaaatccagattcacctggtggaagccctgcccatcgtgctgaacatgttcgagaagaagctgagcagctacgcccagagccacctggaaaacacctccatcaaggtgcacctgagaaccgccgtggccaaggtggaagagaagcagctgctggccaagaccaagcacgaggacggcaagattaccgaggaaaccatcccctacggcaccctgatttgggccaccggcaacaaggccagacccgtgatcaccgacctgttcaagaagatccccgagcagaacagcagcaagcggggcctggccgtgaacgacttcctgcaggtcaaaggcagcaacaacatcttcgccatcggcgacaacgcctttgccggcctgcctcctacagcccaggtggcccaccaggaagccgagtacctggccaagaacttcgacaagatggcccagatccccaatttccagaagaacctgtcctcccggaaggataagatcgacctgctgttcgaggaaaacaacttcaagcccttcaagtacaacgacctgggcgccctggcctacctgggcagcgaaagagccattgccaccatcagaagcggcaagcggaccttctacaccggcggaggcctgatgaccttctacctgtggcggatcctgtacatgagcatgatcctgagcgcccgcagcagactgaaggtgttcttcgactggatcaagctggccttcttcaagagggacttcttcaagggcctgtga

SEQ ID NO: 752 - DNA, 1542 bp, Artificial Sequence
  source: /note="Description of Artificial Sequence: Synthetic polynucleotide"
atgctgagcaagaacctgtacagcaacaagcggctgctgaccagcaccaacaccctcgtgcgcttcgccagcaccagatccaccggcgtcgaaaacagcggggctggccccaccagcttcaagaccatgaaggtcatcgacccccagcacagcgacaagcccaacgtgctgatcctgggctctggctggggcgccatcagctttctgaagcacatcgacaccaagaagtacaacgtcagcatcatcagccccagaagctacttcatcttcacccccctgctgcccagcgcccctgtgggaaccgtggacgagaagtccatcatcgagcccatcgtgaacttcgccctgaagaaaaagggcaacgtcacctactacgaggccgaggccaccagcatcaaccccgaccggaacaccgtgaccatcaagagcctgagcgccgtgtcccagctgtaccagcccgagaaccacctgggcctgcaccaggccgagcccgccgagattaagtacgactacctgatcagcgccgtgggcgccgagcccaacacctttggaatccccggcgtgaccgactacggccacttcctgaaagagatccccaacagcctggaaatccggcggaccttcgccgccaacctggaaaaggccaacctgctgcctaagggcgaccccgagcggagaaggctgctgagcatcgtggtcgtgggcggaggccccacaggcgtggaagctgctggcgagctgcaggactacgtgcaccaggacctgcggaagttcctgcccgccctggccgaggaaatccagattcacctggtggaagccctgcccatcgtgctgaacatgttcgagaagaagctgagcagctacgcccagagccacctggaaaacacctccatcaaggtgcacctgagaaccgccgtggccaaggtggaagagaagcagctgctggccaagaccaagcacgaggacggcaagattaccgaggaaaccatcccctacggcaccctgatttgggccaccggcaacaaggccagacccgtgatcaccgacctgttcaagaagatccccgagcagaacagcagcaagcggggcctggccgtgaacgacttcctgcaggtcaaaggcagcaacaacatcttcgccatcggcgacaacgcctttgccggcctgcctcctacagcccaggtggcccaccaggaagccgagtacctggccaagaacttcgacaagatggcccagatccccaatttccagaagaacctgtcctcccggaaggataagatcgacctgctgttcgaggaaaacaacttcaagcccttcaagtacaacgacctgggcgccctggcctacctgggcagcgaaagagccattgccaccatcagaagcggcaagcggaccttctacaccggcggaggcctgatgaccttctacctgtggcggatcatctacctgagcatgatcctgagcgcccgcagcagactgaaggtgttcttcgactggatcaagctggccttcttcaagagggacttcttcaagggcctgtga

SEQ ID NO: 753 - DNA, 1542 bp, Artificial Sequence
  source: /note="Description of Artificial Sequence: Synthetic polynucleotide"
atgctgagcaagaacctgtacagcaacaagcggctgctgaccagcaccaacaccctcgtgcgcttcgccagcaccagatccaccggcgtcgaaaacagcggggctggccccaccagcttcaagaccatgaagatcatcgacccccagcacagcgacaagcccaacgtgctgatcctgggctctggctggggcgccatcagctttctgaagcacatcgacaccaagaagtacaacgtcagcatcatcagccccagaagctacttcatcttcacccccctgctgcccagcgcccctgtgggaaccgtggacgagaagtccatcatcgagcccatcgtgaacttcgccctgaagaaaaagggcaacgtcacctactacgaggccgaggccaccagcatcaaccccgaccggaacaccgtgaccatcaagagcctgagcgccgtgtcccagctgtaccagcccgagaaccacctgggcctgcaccaggccgagcccgccgagattaagtacgactacctgatcagcgccgtgggcgccgagcccaacacctttggaatccccggcgtgaccgactacggccacttcctgaaagagatccccaacagcctggaaatccggcggaccttcgccgccaacctggaaaaggccaacctgctgcctaagggcgaccccgagcggagaaggctgctgagcatcgtggtcgtgggcggaggccccacaggcgtggaagctgctggcgagctgcaggactacgtgcaccaggacctgcggaagttcctgcccgccctggccgaggaaatccagattcacctggtggaagccctgcccatcgtgctgaacatgttcgagaagaagctgagcagctacgcccagagccacctggaaaacacctccatcaaggtgcacctgagaaccgccgtggccaaggtggaagagaagcagctgctggccaagaccaagcacgaggacggcaagattaccgaggaaaccatcccctacggcaccctgatttgggccaccggcaacaaggccagacccgtgatcaccgacctgttcaagaagatccccgagcagaacagcagcaagcggggcctggccgtgaacgacttcctgcaggtcaaaggcagcaacaacatcttcgccatcggcgacaacgcctttgccggcctgcctcctacagcccaggtggcccaccaggaagccgagtacctggccaagaacttcgacaagatggcccagatccccaatttccagaagaacctgtcctcccggaaggataagatcgacctgctgttcgaggaaaacaacttcaagcccttcaagtacaacgacctgggcgccctggcctacctgggcagcgaaagagccattgccaccatcagaagcggcaagcggaccttctacaccggcggaggcctgatgaccttctacctgtggcggatcctgtacctgagcatgatcctgagcgcccgcagcagactgaaggtgttcttcgactggatcaagctggccttcttcaagagggacttcttcaagggcctgtga

SEQ ID NO: 754 - DNA, 1542 bp, Artificial Sequence
  source: /note="Description of Artificial Sequence: Synthetic polynucleotide"
atgctgagcaagaacctgtacagcaacaagcggctgctgaccagcaccaacaccctcgtgcgcttcgccagcaccagatccaccggcgtcgaaaacagcggggctggccccaccagcttcaagaccatgaaggtcatcgacccccagcacagcgacaagcccaacgtgctgatcctgggctctggctggggcgccatcagctttctgaagcacatcgacaccaagaagtacaacgtcagcatcatcagccccagaagctacttcatcttcacccccctgctgcccagcgcccctgtgggaaccgtggacgagaagtccatcatcgagcccatcgtgaacttcgccctgaagaaaaagggcaacgtcacctactacgaggccgaggccaccagcatcaaccccgaccggaacaccgtgaccatcaagagcctgagcgccgtgtcccagctgtaccagcccgagaaccacctgggcctgcaccaggccgagcccgccgagattaagtacgactacctgatcagcgccgtgggcgccgagcccaacacctttggaatccccggcgtgaccgactacggccacttcctgaaagagatccccaacagcctggaaatccggcggaccttcgccgccaacctggaaaaggccaacctgctgcctaagggcgaccccgagcggagaaggctgctgagcatcgtggtcgtgggcggaggccccacaggcgtggaagctgctggcgagctgcaggactacgtgcaccaggacctgcggaagttcctgcccgccctggccgaggaagtgcagattcacctggtggaagccctgcccatcgtgctgaacatgttcgagaagaagctgagcagctacgcccagagccacctggaaaacacctccatcaaggtgcacctgagaaccgccgtggccaaggtggaagagaagcagctgctggccaagaccaagcacgaggacggcaagattaccgaggaaaccatcccctacggcaccctgatttgggccaccggcaacaaggccagacccgtgatcaccgacctgttcaagaagatccccgagcagaacagcagcaagcggggcctggccgtgaacgacttcctgcaggtcaaaggcagcaacaacatcttcgccatcggcgacaacgcctttgccggcctgcctcctacagcccaggtggcccaccaggaagccgagtacctggccaagaacttcgacaagatggcccagatccccaatttccagaagaacctgtcctcccggaaggataagatcgacctgctgttcgaggaaaacaacttcaagcccttcaagtacaacgacctgggcgccctggcctacctgggcagcgaaagagccattgccaccatcagaagcggcaagcggaccttctacaccggcggaggcctgatgaccttctacctgtggcggatcatctacatgagcatgatcctgagcgcccgcagcagactgaaggtgttcttcgactggatcaagctggccttcttcaagagggacttcttcaagggcctgtga

SEQ ID NO: 755 - DNA, 1542 bp, Artificial Sequence
  source: /note="Description of Artificial Sequence: Synthetic polynucleotide"
atgctgagcaagaacctgtacagcaacaagcggctgctgaccagcaccaacaccctcgtgcgcttcgccagcaccagatccaccggcgtcgaaaacagcggggctggccccaccagcttcaagaccatgaagatcatcgacccccagcacagcgacaagcccaacgtgctgatcctgggctctggctggggcgccatcagctttctgaagcacatcgacaccaagaagtacaacgtcagcatcatcagccccagaagctacttcatcttcacccccctgctgcccagcgcccctgtgggaaccgtggacgagaagtccatcatcgagcccatcgtgaacttcgccctgaagaaaaagggcaacgtcacctactacgaggccgaggccaccagcatcaaccccgaccggaacaccgtgaccatcaagagcctgagcgccgtgtcccagctgtaccagcccgagaaccacctgggcctgcaccaggccgagcccgccgagattaagtacgactacctgatcagcgccgtgggcgccgagcccaacacctttggaatccccggcgtgaccgactacggccacttcctgaaagagatccccaacagcctggaaatccggcggaccttcgccgccaacctggaaaaggccaacctgctgcctaagggcgaccccgagcggagaaggctgctgagcatcgtggtcgtgggcggaggccccacaggcgtggaagctgctggcgagctgcaggactacgtgcaccaggacctgcggaagttcctgcccgccctggccgaggaagtgcagattcacctggtggaagccctgcccatcgtgctgaacatgttcgagaagaagctgagcagctacgcccagagccacctggaaaacacctccatcaaggtgcacctgagaaccgccgtggccaaggtggaagagaagcagctgctggccaagaccaagcacgaggacggcaagattaccgaggaaaccatcccctacggcaccctgatttgggccaccggcaacaaggccagacccgtgatcaccgacctgttcaagaagatccccgagcagaacagcagcaagcggggcctggccgtgaacgacttcctgcaggtcaaaggcagcaacaacatcttcgccatcggcgacaacgcctttgccggcctgcctcctacagcccaggtggcccaccaggaagccgagtacctggccaagaacttcgacaagatggcccagatccccaatttccagaagaacctgtcctcccggaaggataagatcgacctgctgttcgaggaaaacaacttcaagcccttcaagtacaacgacctgggcgccctggcctacctgggcagcgaaagagccattgccaccatcagaagcggcaagcggaccttctacaccggcggaggcctgatgaccttctacctgtggcggatcctgtacatgagcatgatcctgagcgcccgcagcagactgaaggtgttcttcgactggatcaagctggccttcttcaagagggacttcttcaagggcctgtga

SEQ ID NO: 756 - DNA, 1542 bp, Artificial Sequence
  source: /note="Description of Artificial Sequence: Synthetic polynucleotide"
atgctgagcaagaacctgtacagcaacaagcggctgctgaccagcaccaacaccctcgtgcgcttcgccagcaccagatccaccggcgtcgaaaacagcggggctggccccaccagcttcaagaccatgaagatcatcgacccccagcacagcgacaagcccaacgtgctgatcctgggctctggctggggcgccatcagctttctgaagcacatcgacaccaagaagtacaacgtcagcatcatcagccccagaagctacttcatcttcacccccctgctgcccagcgcccctgtgggaaccgtggacgagaagtccatcatcgagcccatcgtgaacttcgccctgaagaaaaagggcaacgtcacctactacgaggccgaggccaccagcatcaaccccgaccggaacaccgtgaccatcaagagcctgagcgccgtgtcccagctgtaccagcccgagaaccacctgggcctgcaccaggccgagcccgccgagattaagtacgactacctgatcagcgccgtgggcgccgagcccaacacctttggaatccccggcgtgaccgactacggccacttcctgaaagagatccccaacagcctggaaatccggcggaccttcgccgccaacctggaaaaggccaacctgctgcctaagggcgaccccgagcggagaaggctgctgagcatcgtggtcgtgggcggaggccccacaggcgtggaagctgctggcgagctgcaggactacgtgcaccaggacctgcggaagttcctgcccgccctggccgaggaagtgcagattcacctggtggaagccctgcccatcgtgctgaacatgttcgagaagaagctgagcagctacgcccagagccacctggaaaacacctccatcaaggtgcacctgagaaccgccgtggccaaggtggaagagaagcagctgctggccaagaccaagcacgaggacggcaagattaccgaggaaaccatcccctacggcaccctgatttgggccaccggcaacaaggccagacccgtgatcaccgacctgttcaagaagatccccgagcagaacagcagcaagcggggcctggccgtgaacgacttcctgcaggtcaaaggcagcaacaacatcttcgccatcggcgacaacgcctttgccggcctgcctcctacagcccaggtggcccaccaggaagccgagtacctggccaagaacttcgacaagatggcccagatccccaatttccagaagaacctgtcctcccggaaggataagatcgacctgctgttcgaggaaaacaacttcaagcccttcaagtacaacgacctgggcgccctggcctacctgggcagcgaaagagccattgccaccatcagaagcggcaagcggaccttctacaccggcggaggcctgatgaccttctacctgtggcggatcatctacctgagcatgatcctgagcgcccgcagcagactgaaggtgttcttcgactggatcaagctggccttcttcaagagggacttcttcaagggcctgtga

SEQ ID NO: 757 - DNA, 1542 bp, Artificial Sequence
  source: /note="Description of Artificial Sequence: Synthetic polynucleotide"
atgctgagcaagaacctgtacagcaacaagcggctgctgaccagcaccaacaccctcgtgcgcttcgccagcaccagatccaccggcgtcgaaaacagcggggctggccccaccagcttcaagaccatgaaggtcatcgacccccagcacagcgacaagcccaacgtgctgatcctgggctctggctggggcgccatcagctttctgaagcacatcgacaccaagaagtacaacgtcagcatcatcagccccagaagctacttcctgttcacccccctgctgcccagcgcccctgtgggaaccgtggacgagaagtccatcatcgagcccatcgtgaacttcgccctgaagaaaaagggcaacgtcacctactacgaggccgaggccaccagcatcaaccccgaccggaacaccgtgaccatcaagagcctgagcgccgtgtcccagctgtaccagcccgagaaccacctgggcctgcaccaggccgagcccgccgagattaagtacgactacctgatcagcgccgtgggcgccgagcccaacacctttggaatccccggcgtgaccgactacggccacttcctgaaagagatccccaacagcctggaaatccggcggaccttcgccgccaacctggaaaaggccaacctgctgcctaagggcgaccccgagcggagaaggctgctgagcatcgtggtcgtgggcggaggccccacaggcgtggaagctgctggcgagctgcaggactacgtgcaccaggacctgcggaagttcctgcccgccctggccgaggaaatccagattcacctggtggaagccctgcccatcgtgctgaacatgttcgagaagaagctgagcagctacgcccagagccacctggaaaacacctccatcaaggtgcacctgagaaccgccgtggccaaggtggaagagaagcagctgctggccaagaccaagcacgaggacggcaagattaccgaggaaaccatcccctacggcaccctgatttgggccaccggcaacaaggccagacccgtgatcaccgacctgttcaagaagatccccgagcagaacagcagcaagcggggcctggccgtgaacgacttcctgcaggtcaaaggcagcaacaacatcttcgccatcggcgacaacgcctttgccggcctgcctcctacagcccaggtggcccaccaggaagccgagtacctggccaagaacttcgacaagatggcccagatccccaatttccagaagaacctgtcctcccggaaggataagatcgacctgctgttcgaggaaaacaacttcaagcccttcaagtacaacgacctgggcgccctggcctacctgggcagcgaaagagccattgccaccatcagaagcggcaagcggaccttctacaccggcggaggcctgatgaccttctacctgtggcggatcatctacatgagcatgatcctgagcgcccgcagcagactgaaggtgttcttcgactggatcaagctggccttcttcaagagggacttcttcaagggcctgtga

SEQ ID NO: 758 - DNA, 1542 bp, Artificial Sequence
  source: /note="Description of Artificial Sequence: Synthetic polynucleotide"
atgctgagcaagaacctgtacagcaacaagcggctgctgaccagcaccaacaccctcgtgcgcttcgccagcaccagatccaccggcgtcgaaaacagcggggctggccccaccagcttcaagaccatgaagatcatcgacccccagcacagcgacaagcccaacgtgctgatcctgggctctggctggggcgccatcagctttctgaagcacatcgacaccaagaagtacaacgtcagcatcatcagccccagaagctacttcctgttcacccccctgctgcccagcgcccctgtgggaaccgtggacgagaagtccatcatcgagcccatcgtgaacttcgccctgaagaaaaagggcaacgtcacctactacgaggccgaggccaccagcatcaaccccgaccggaacaccgtgaccatcaagagcctgagcgccgtgtcccagctgtaccagcccgagaaccacctgggcctgcaccaggccgagcccgccgagattaagtacgactacctgatcagcgccgtgggcgccgagcccaacacctttggaatccccggcgtgaccgactacggccacttcctgaaagagatccccaacagcctggaaatccggcggaccttcgccgccaacctggaaaaggccaacctgctgcctaagggcgaccccgagcggagaaggctgctgagcatcgtggtcgtgggcggaggccccacaggcgtggaagctgctggcgagctgcaggactacgtgcaccaggacctgcggaagttcctgcccgccctggccgaggaaatccagattcacctggtggaagccctgcccatcgtgctgaacatgttcgagaagaagctgagcagctacgcccagagccacctggaaaacacctccatcaaggtgcacctgagaaccgccgtggccaaggtggaagagaagcagctgctggccaagaccaagcacgaggacggcaagattaccgaggaaaccatcccctacggcaccctgatttgggccaccggcaacaaggccagacccgtgatcaccgacctgttcaagaagatccccgagcagaacagcagcaagcggggcctggccgtgaacgacttcctgcaggtcaaaggcagcaacaacatcttcgccatcggcgacaacgcctttgccggcctgcctcctacagcccaggtggcccaccaggaagccgagtacctggccaagaacttcgacaagatggcccagatccccaatttccagaagaacctgtcctcccggaaggataagatcgacctgctgttcgaggaaaacaacttcaagcccttcaagtacaacgacctgggcgccctggcctacctgggcagcgaaagagccattgccaccatcagaagcggcaagcggaccttctacaccggcggaggcctgatgaccttctacctgtggcggatcctgtacatgagcatgatcctgagcgcccgcagcagactgaaggtgttcttcgactggatcaagctggccttcttcaagagggacttcttcaagggcctgtga

SEQ ID NO: 759 - DNA, 1542 bp, Artificial Sequence
  source: /note="Description of Artificial Sequence: Synthetic polynucleotide"
atgctgagcaagaacctgtacagcaacaagcggctgctgaccagcaccaacaccctcgtgcgcttcgccagcaccagatccaccggcgtcgaaaacagcggggctggccccaccagcttcaagaccatgaagatcatcgacccccagcacagcgacaagcccaacgtgctgatcctgggctctggctggggcgccatcagctttctgaagcacatcgacaccaagaagtacaacgtcagcatcatcagccccagaagctacttcctgttcacccccctgctgcccagcgcccctgtgggaaccgtggacgagaagtccatcatcgagcccatcgtgaacttcgccctgaagaaaaagggcaacgtcacctactacgaggccgaggccaccagcatcaaccccgaccggaacaccgtgaccatcaagagcctgagcgccgtgtcccagctgtaccagcccgagaaccacctgggcctgcaccaggccgagcccgccgagattaagtacgactacctgatcagcgccgtgggcgccgagcccaacacctttggaatccccggcgtgaccgactacggccacttcctgaaagagatccccaacagcctggaaatccggcggaccttcgccgccaacctggaaaaggccaacctgctgcctaagggcgaccccgagcggagaaggctgctgagcatcgtggtcgtgggcggaggccccacaggcgtggaagctgctggcgagctgcaggactacgtgcaccaggacctgcggaagttcctgcccgccctggccgaggaaatccagattcacctggtggaagccctgcccatcgtgctgaacatgttcgagaagaagctgagcagctacgcccagagccacctggaaaacacctccatcaaggtgcacctgagaaccgccgtggccaaggtggaagagaagcagctgctggccaagaccaagcacgaggacggcaagattaccgaggaaaccatcccctacggcaccctgatttgggccaccggcaacaaggccagacccgtgatcaccgacctgttcaagaagatccccgagcagaacagcagcaagcggggcctggccgtgaacgacttcctgcaggtcaaaggcagcaacaacatcttcgccatcggcgacaacgcctttgccggcctgcctcctacagcccaggtggcccaccaggaagccgagtacctggccaagaacttcgacaagatggcccagatccccaatttccagaagaacctgtcctcccggaaggataagatcgacctgctgttcgaggaaaacaacttcaagcccttcaagtacaacgacctgggcgccctggcctacctgggcagcgaaagagccattgccaccatcagaagcggcaagcggaccttctacaccggcggaggcctgatgaccttctacctgtggcggatcatctacctgagcatgatcctgagcgcccgcagcagactgaaggtgttcttcgactggatcaagctggccttcttcaagagggacttcttcaagggcctgtga

SEQ ID NO: 760 - DNA, 1542 bp, Artificial Sequence
  source: /note="Description of Artificial Sequence: Synthetic polynucleotide"
atgctgagcaagaacctgtacagcaacaagcggctgctgaccagcaccaacaccctcgtgcgcttcgccagcaccagatccaccggcgtcgaaaacagcggggctggccccaccagcttcaagaccatgaagatcatcgacccccagcacagcgacaagcccaacgtgctgatcctgggctctggctggggcgccatcagctttctgaagcacatcgacaccaagaagtacaacgtcagcatcatcagccccagaagctacttcctgttcacccccctgctgcccagcgcccctgtgggaaccgtggacgagaagtccatcatcgagcccatcgtgaacttcgccctgaagaaaaagggcaacgtcacctactacgaggccgaggccaccagcatcaaccccgaccggaacaccgtgaccatcaagagcctgagcgccgtgtcccagctgtaccagcccgagaaccacctgggcctgcaccaggccgagcccgccgagattaagtacgactacctgatcagcgccgtgggcgccgagcccaacacctttggaatccccggcgtgaccgactacggccacttcctgaaagagatccccaacagcctggaaatccggcggaccttcgccgccaacctggaaaaggccaacctgctgcctaagggcgaccccgagcggagaaggctgctgagcatcgtggtcgtgggcggaggccccacaggcgtggaagctgctggcgagctgcaggactacgtgcaccaggacctgcggaagttcctgcccgccctggccgaggaagtgcagattcacctggtggaagccctgcccatcgtgctgaacatgttcgagaagaagctgagcagctacgcccagagccacctggaaaacacctccatcaaggtgcacctgagaaccgccgtggccaaggtggaagagaagcagctgctggccaagaccaagcacgaggacggcaagattaccgaggaaaccatcccctacggcaccctgatttgggccaccggcaacaaggccagacccgtgatcaccgacctgttcaagaagatccccgagcagaacagcagcaagcggggcctggccgtgaacgacttcctgcaggtcaaaggcagcaacaacatcttcgccatcggcgacaacgcctttgccggcctgcctcctacagcccaggtggcccaccaggaagccgagtacctggccaagaacttcgacaagatggcccagatccccaatttccagaagaacctgtcctcccggaaggataagatcgacctgctgttcgaggaaaacaacttcaagcccttcaagtacaacgacctgggcgccctggcctacctgggcagcgaaagagccattgccaccatcagaagcggcaagcggaccttctacaccggcggaggcctgatgaccttctacctgtggcggatcatctacatgagcatgatcctgagcgcccgcagcagactgaaggtgttcttcgactggatcaagctggccttcttcaagagggacttcttcaagggcctgtga

SEQ ID NO: 761 - DNA, 1542 bp, Artificial Sequence
  source: /note="Description of Artificial Sequence: Synthetic polynucleotide"
atgctgagcaagaacctgtacagcaacaagcggctgctgaccagcaccaacaccctcgtgcgcttcgccagcaccagatccaccggcgtcgaaaacagcggggctggccccaccagcttcaagaccatgaaggtcatcgacccccagcacagcgacaagcccaacgtgctgatcctgggctctggctggggcgccatcagctttctgaagcacatcgacaccaagaagtacaacgtcagcatcgtgagccccagaagctacttcatctacacccccctgctgcccagcgcccctgtgggaaccgtggacgagaagtccatcatcgagcccatcgtgaacttcgccctgaagaaaaagggcaacgtcacctactacgaggccgaggccaccagcatcaaccccgaccggaacaccgtgaccatcaagagcctgagcgccgtgtcccagctgtaccagcccgagaaccacctgggcctgcaccaggccgagcccgccgagattaagtacgactacctgatcagcgccgtgggcgccgagcccaacacctttggaatccccggcgtgaccgactacggccacttcctgaaagagatccccaacagcctggaaatccggcggaccttcgccgccaacctggaaaaggccaacctgctgcctaagggcgaccccgagcggagaaggctgctgagcatcgtggtcgtgggcggaggccccacaggcgtggaagctgctggcgagctgcaggactacgtgcaccaggacctgcggaagttcctgcccgccctggccgaggaaatccagattcacctggtggaagccctgcccatcgtgctgaacatgttcgagaagaagctgagcagctacgcccagagccacctggaaaacacctccatcaaggtgcacctgagaaccgccgtggccaaggtggaagagaagcagctgctggccaagaccaagcacgaggacggcaagattaccgaggaaaccatcccctacggcaccctgatttgggccaccggcaacaaggccagacccgtgatcaccgacctgttcaagaagatccccgagcagaacagcagcaagcggggcctggccgtgaacgacttcctgcaggtcaaaggcagcaacaacatcttcgccatcggcgacaacgcctttgccggcctgcctcctacagcccaggtggcccaccaggaagccgagtacctggccaagaacttcgacaagatggcccagatccccaatttccagaagaacctgtcctcccggaaggataagatcgacctgctgttcgaggaaaacaacttcaagcccttcaagtacaacgacctgggcgccctggcctacctgggcagcgaaagagccattgccaccatcagaagcggcaagcggaccttctacaccggcggaggcctgatgaccttctacctgtggcggatcctgtacctgagcatgatcctgagcgcccgcagcagactgaaggtgttcttcgactggatcaagctggccttcttcaagagggacttcttcaagggcctgtga

SEQ ID NO: 762 - DNA, 1542 bp, Artificial Sequence
  source: /note="Description of Artificial Sequence: Synthetic polynucleotide"
atgctgagcaagaacctgtacagcaacaagcggctgctgaccagcaccaacaccctcgtgcgcttcgccagcaccagatccaccggcgtcgaaaacagcggggctggccccaccagcttcaagaccatgaaggtcatcgacccccagcacagcgacaagcccaacgtgctgatcctgggctctggctggggcgccatcagctttctgaagcacatcgacaccaagaagtacaacgtcagcatcgtgagccccagaagctacttcatctacacccccctgctgcccagcgcccctgtgggaaccgtggacgagaagtccatcatcgagcccatcgtgaacttcgccctgaagaaaaagggcaacgtcacctactacgaggccgaggccaccagcatcaaccccgaccggaacaccgtgaccatcaagagcctgagcgccgtgtcccagctgtaccagcccgagaaccacctgggcctgcaccaggccgagcccgccgagattaagtacgactacctgatcagcgccgtgggcgccgagcccaacacctttggaatccccggcgtgaccgactacggccacttcctgaaagagatccccaacagcctggaaatccggcggaccttcgccgccaacctggaaaaggccaacctgctgcctaagggcgaccccgagcggagaaggctgctgagcatcgtggtcgtgggcggaggccccacaggcgtggaagctgctggcgagctgcaggactacgtgcaccaggacctgcggaagttcctgcccgccctggccgaggaagtgcagattcacctggtggaagccctgcccatcgtgctgaacatgttcgagaagaagctgagcagctacgcccagagccacctggaaaacacctccatcaaggtgcacctgagaaccgccgtggccaaggtggaagagaagcagctgctggccaagaccaagcacgaggacggcaagattaccgaggaaaccatcccctacggcaccctgatttgggccaccggcaacaaggccagacccgtgatcaccgacctgttcaagaagatccccgagcagaacagcagcaagcggggcctggccgtgaacgacttcctgcaggtcaaaggcagcaacaacatcttcgccatcggcgacaacgcctttgccggcctgcctcctacagcccaggtggcccaccaggaagccgagtacctggccaagaacttcgacaagatggcccagatccccaatttccagaagaacctgtcctcccggaaggataagatcgacctgctgttcgaggaaaacaacttcaagcccttcaagtacaacgacctgggcgccctggcctacctgggcagcgaaagagccattgccaccatcagaagcggcaagcggaccttctacaccggcggaggcctgatgaccttctacctgtggcggatcctgtacatgagcatgatcctgagcgcccgcagcagactgaaggtgttcttcgactggatcaagctggccttcttcaagagggacttcttcaagggcctgtga

SEQ ID NO: 763 - DNA, 1542 bp, Artificial Sequence
  source: /note="Description of Artificial Sequence: Synthetic polynucleotide"
atgctgagcaagaacctgtacagcaacaagcggctgctgaccagcaccaacaccctcgtgcgcttcgccagcaccagatccaccggcgtcgaaaacagcggggctggccccaccagcttcaagaccatgaaggtcatcgacccccagcacagcgacaagcccaacgtgctgatcctgggctctggctggggcgccatcagctttctgaagcacatcgacaccaagaagtacaacgtcagcatcgtgagccccagaagctacttcatctacacccccctgctgcccagcgcccctgtgggaaccgtggacgagaagtccatcatcgagcccatcgtgaacttcgccctgaagaaaaagggcaacgtcacctactacgaggccgaggccaccagcatcaaccccgaccggaacaccgtgaccatcaagagcctgagcgccgtgtcccagctgtaccagcccgagaaccacctgggcctgcaccaggccgagcccgccgagattaagtacgactacctgatcagcgccgtgggcgccgagcccaacacctttggaatccccggcgtgaccgactacggccacttcctgaaagagatccccaacagcctggaaatccggcggaccttcgccgccaacctggaaaaggccaacctgctgcctaagggcgaccccgagcggagaaggctgctgagcatcgtggtcgtgggcggaggccccacaggcgtggaagctgctggcgagctgcaggactacgtgcaccaggacctgcggaagttcctgcccgccctggccgaggaagtgcagattcacctggtggaagccctgcccatcgtgctgaacatgttcgagaagaagctgagcagctacgcccagagccacctggaaaacacctccatcaaggtgcacctgagaaccgccgtggccaaggtggaagagaagcagctgctggccaagaccaagcacgaggacggcaagattaccgaggaaaccatcccctacggcaccctgatttgggccaccggcaacaaggccagacccgtgatcaccgacctgttcaagaagatccccgagcagaacagcagcaagcggggcctggccgtgaacgacttcctgcaggtcaaaggcagcaacaacatcttcgccatcggcgacaacgcctttgccggcctgcctcctacagcccaggtggcccaccaggaagccgagtacctggccaagaacttcgacaagatggcccagatccccaatttccagaagaacctgtcctcccggaaggataagatcgacctgctgttcgaggaaaacaacttcaagcccttcaagtacaacgacctgggcgccctggcctacctgggcagcgaaagagccattgccaccatcagaagcggcaagcggaccttctacaccggcggaggcctgatgaccttctacctgtggcggatcatctacctgagcatgatcctgagcgcccgcagcagactgaaggtgttcttcgactggatcaagctggccttcttcaagagggacttcttcaagggcctgtga

SEQ ID NO: 764 - DNA, 1542 bp, Artificial Sequence
  source: /note="Description of Artificial Sequence: Synthetic polynucleotide"
atgctgagcaagaacctgtacagcaacaagcggctgctgaccagcaccaacaccctcgtgcgcttcgccagcaccagatccaccggcgtcgaaaacagcggggctggccccaccagcttcaagaccatgaagatcatcgacccccagcacagcgacaagcccaacgtgctgatcctgggctctggctggggcgccatcagctttctgaagcacatcgacaccaagaagtacaacgtcagcatcgtgagccccagaagctacttcatctacacccccctgctgcccagcgcccctgtgggaaccgtggacgagaagtccatcatcgagcccatcgtgaacttcgccctgaagaaaaagggcaacgtcacctactacgaggccgaggccaccagcatcaaccccgaccggaacaccgtgaccatcaagagcctgagcgccgtgtcccagctgtaccagcccgagaaccacctgggcctgcaccaggccgagcccgccgagattaagtacgactacctgatcagcgccgtgggcgccgagcccaacacctttggaatccccggcgtgaccgactacggccacttcctgaaagagatccccaacagcctggaaatccggcggaccttcgccgccaacctggaaaaggccaacctgctgcctaagggcgaccccgagcggagaaggctgctgagcatcgtggtcgtgggcggaggccccacaggcgtggaagctgctggcgagctgcaggactacgtgcaccaggacctgcggaagttcctgcccgccctggccgaggaagtgcagattcacctggtggaagccctgcccatcgtgctgaacatgttcgagaagaagctgagcagctacgcccagagccacctggaaaacacctccatcaaggtgcacctgagaaccgccgtggccaaggtggaagagaagcagctgctggccaagaccaagcacgaggacggcaagattaccgaggaaaccatcccctacggcaccctgatttgggccaccggcaacaaggccagacccgtgatcaccgacctgttcaagaagatccccgagcagaacagcagcaagcggggcctggccgtgaacgacttcctgcaggtcaaaggcagcaacaacatcttcgccatcggcgacaacgcctttgccggcctgcctcctacagcccaggtggcccaccaggaagccgagtacctggccaagaacttcgacaagatggcccagatccccaatttccagaagaacctgtcctcccggaaggataagatcgacctgctgttcgaggaaaacaacttcaagcccttcaagtacaacgacctgggcgccctggcctacctgggcagcgaaagagccattgccaccatcagaagcggcaagcggaccttctacaccggcggaggcctgatgaccttctacctgtggcggatcctgtacctgagcatgatcctgagcgcccgcagcagactgaaggtgttcttcgactggatcaagctggccttcttcaagagggacttcttcaagggcctgtga

SEQ ID NO: 765 - DNA, 1542 bp, Artificial Sequence
  source: /note="Description of Artificial Sequence: Synthetic polynucleotide"
atgctgagcaagaacctgtacagcaacaagcggctgctgaccagcaccaacaccctcgtgcgcttcgccagcaccagatccaccggcgtcgaaaacagcggggctggccccaccagcttcaagaccatgaaggtcatcgacccccagcacagcgacaagcccaacgtgctgatcctgggctctggctggggcgccatcagctttctgaagcacatcgacaccaagaagtacaacgtcagcatcgtgagccccagaagctacttcctgtacacccccctgctgcccagcgcccctgtgggaaccgtggacgagaagtccatcatcgagcccatcgtgaacttcgccctgaagaaaaagggcaacgtcacctactacgaggccgaggccaccagcatcaaccccgaccggaacaccgtgaccatcaagagcctgagcgccgtgtcccagctgtaccagcccgagaaccacctgggcctgcaccaggccgagcccgccgagattaagtacgactacctgatcagcgccgtgggcgccgagcccaacacctttggaatccccggcgtgaccgactacggccacttcctgaaagagatccccaacagcctggaaatccggcggaccttcgccgccaacctggaaaaggccaacctgctgcctaagggcgaccccgagcggagaaggctgctgagcatcgtggtcgtgggcggaggccccacaggcgtggaagctgctggcgagctgcaggactacgtgcaccaggacctgcggaagttcctgcccgccctggccgaggaaatccagattcacctggtggaagccctgcccatcgtgctgaacatgttcgagaagaagctgagcagctacgcccagagccacctggaaaacacctccatcaaggtgcacctgagaaccgccgtggccaaggtggaagagaagcagctgctggccaagaccaagcacgaggacggcaagattaccgaggaaaccatcccctacggcaccctgatttgggccaccggcaacaaggccagacccgtgatcaccgacctgttcaagaagatccccgagcagaacagcagcaagcggggcctggccgtgaacgacttcctgcaggtcaaaggcagcaacaacatcttcgccatcggcgacaacgcctttgccggcctgcctcctacagcccaggtggcccaccaggaagccgagtacctggccaagaacttcgacaagatggcccagatccccaatttccagaagaacctgtcctcccggaaggataagatcgacctgctgttcgaggaaaacaacttcaagcccttcaagtacaacgacctgggcgccctggcctacctgggcagcgaaagagccattgccaccatcagaagcggcaagcggaccttctacaccggcggaggcctgatgaccttctacctgtggcggatcctgtacatgagcatgatcctgagcgcccgcagcagactgaaggtgttcttcgactggatcaagctggccttcttcaagagggacttcttcaagggcctgtga

SEQ ID NO: 766 - DNA, 1542 bp, Artificial Sequence
  source: /note="Description of Artificial Sequence: Synthetic polynucleotide"
atgctgagcaagaacctgtacagcaacaagcggctgctgaccagcaccaacaccctcgtgcgcttcgccagcaccagatccaccggcgtcgaaaacagcggggctggccccaccagcttcaagaccatgaaggtcatcgacccccagcacagcgacaagcccaacgtgctgatcctgggctctggctggggcgccatcagctttctgaagcacatcgacaccaagaagtacaacgtcagcatcgtgagccccagaagctacttcctgtacacccccctgctgcccagcgcccctgtgggaaccgtggacgagaagtccatcatcgagcccatcgtgaacttcgccctgaagaaaaagggcaacgtcacctactacgaggccgaggccaccagcatcaaccccgaccggaacaccgtgaccatcaagagcctgagcgccgtgtcccagctgtaccagcccgagaaccacctgggcctgcaccaggccgagcccgccgagattaagtacgactacctgatcagcgccgtgggcgccgagcccaacacctttggaatccccggcgtgaccgactacggccacttcctgaaagagatccccaacagcctggaaatccggcggaccttcgccgccaacctggaaaaggccaacctgctgcctaagggcgaccccgagcggagaaggctgctgagcatcgtggtcgtgggcggaggccccacaggcgtggaagctgctggcgagctgcaggactacgtgcaccaggacctgcggaagttcctgcccgccctggccgaggaaatccagattcacctggtggaagccctgcccatcgtgctgaacatgttcgagaagaagctgagcagctacgcccagagccacctggaaaacacctccatcaaggtgcacctgagaaccgccgtggccaaggtggaagagaagcagctgctggccaagaccaagcacgaggacggcaagattaccgaggaaaccatcccctacggcaccctgatttgggccaccggcaacaaggccagacccgtgatcaccgacctgttcaagaagatccccgagcagaacagcagcaagcggggcctggccgtgaacgacttcctgcaggtcaaaggcagcaacaacatcttcgccatcggcgacaacgcctttgccggcctgcctcctacagcccaggtggcccaccaggaagccgagtacctggccaagaacttcgacaagatggcccagatccccaatttccagaagaacctgtcctcccggaaggataagatcgacctgctgttcgaggaaaacaacttcaagcccttcaagtacaacgacctgggcgccctggcctacctgggcagcgaaagagccattgccaccatcagaagcggcaagcggaccttctacaccggcggaggcctgatgaccttctacctgtggcggatcatctacctgagcatgatcctgagcgcccgcagcagactgaaggtgttcttcgactggatcaagctggccttcttcaagagggacttcttcaagggcctgtga

SEQ ID NO: 767 - DNA, 1542 bp, Artificial Sequence
  source: /note="Description of Artificial Sequence: Synthetic polynucleotide"
atgctgagcaagaacctgtacagcaacaagcggctgctgaccagcaccaacaccctcgtgcgcttcgccagcaccagatccaccggcgtcgaaaacagcggggctggccccaccagcttcaagaccatgaagatcatcgacccccagcacagcgacaagcccaacgtgctgatcctgggctctggctggggcgccatcagctttctgaagcacatcgacaccaagaagtacaacgtcagcatcgtgagccccagaagctacttcctgtacacccccctgctgcccagcgcccctgtgggaaccgtggacgagaagtccatcatcgagcccatcgtgaacttcgccctgaagaaaaagggcaacgtcacctactacgaggccgaggccaccagcatcaaccccgaccggaacaccgtgaccatcaagagcctgagcgccgtgtcccagctgtaccagcccgagaaccacctgggcctgcaccaggccgagcccgccgagattaagtacgactacctgatcagcgccgtgggcgccgagcccaacacctttggaatccccggcgtgaccgactacggccacttcctgaaagagatccccaacagcctggaaatccggcggaccttcgccgccaacctggaaaaggccaacctgctgcctaagggcgaccccgagcggagaaggctgctgagcatcgtggtcgtgggcggaggccccacaggcgtggaagctgctggcgagctgcaggactacgtgcaccaggacctgcggaagttcctgcccgccctggccgaggaaatccagattcacctggtggaagccctgcccatcgtgctgaacatgttcgagaagaagctgagcagctacgcccagagccacctggaaaacacctccatcaaggtgcacctgagaaccgccgtggccaaggtggaagagaagcagctgctggccaagaccaagcacgaggacggcaagattaccgaggaaaccatcccctacggcaccctgatttgggccaccggcaacaaggccagacccgtgatcaccgacctgttcaagaagatccccgagcagaacagcagcaagcggggcctggccgtgaacgacttcctgcaggtcaaaggcagcaacaacatcttcgccatcggcgacaacgcctttgccggcctgcctcctacagcccaggtggcccaccaggaagccgagtacctggccaagaacttcgacaagatggcccagatccccaatttccagaagaacctgtcctcccggaaggataagatcgacctgctgttcgaggaaaacaacttcaagcccttcaagtacaacgacctgggcgccctggcctacctgggcagcgaaagagccattgccaccatcagaagcggcaagcggaccttctacaccggcggaggcctgatgaccttctacctgtggcggatcctgtacctgagcatgatcctgagcgcccgcagcagactgaaggtgttcttcgactggatcaagctggccttcttcaagagggacttcttcaagggcctgtga

SEQ ID NO: 768 - DNA, 1542 bp, Artificial Sequence
  source: /note="Description of Artificial Sequence: Synthetic polynucleotide"
atgctgagcaagaacctgtacagcaacaagcggctgctgaccagcaccaacaccctcgtgcgcttcgccagcaccagatccaccggcgtcgaaaacagcggggctggccccaccagcttcaagaccatgaaggtcatcgacccccagcacagcgacaagcccaacgtgctgatcctgggctctggctggggcgccatcagctttctgaagcacatcgacaccaagaagtacaacgtcagcatcgtgagccccagaagctacttcctgtacacccccctgctgcccagcgcccctgtgggaaccgtggacgagaagtccatcatcgagcccatcgtgaacttcgccctgaagaaaaagggcaacgtcacctactacgaggccgaggccaccagcatcaaccccgaccggaacaccgtgaccatcaagagcctgagcgccgtgtcccagctgtaccagcccgagaaccacctgggcctgcaccaggccgagcccgccgagattaagtacgactacctgatcagcgccgtgggcgccgagcccaacacctttggaatccccggcgtgaccgactacggccacttcctgaaagagatccccaacagcctggaaatccggcggaccttcgccgccaacctggaaaaggccaacctgctgcctaagggcgaccccgagcggagaaggctgctgagcatcgtggtcgtgggcggaggccccacaggcgtggaagctgctggcgagctgcaggactacgtgcaccaggacctgcggaagttcctgcccgccctggccgaggaagtgcagattcacctggtggaagccctgcccatcgtgctgaacatgttcgagaagaagctgagcagctacgcccagagccacctggaaaacacctccatcaaggtgcacctgagaaccgccgtggccaaggtggaagagaagcagctgctggccaagaccaagcacgaggacggcaagattaccgaggaaaccatcccctacggcaccctgatttgggccaccggcaacaaggccagacccgtgatcaccgacctgttcaagaagatccccgagcagaacagcagcaagcggggcctggccgtgaacgacttcctgcaggtcaaaggcagcaacaacatcttcgccatcggcgacaacgcctttgccggcctgcctcctacagcccaggtggcccaccaggaagccgagtacctggccaagaacttcgacaagatggcccagatccccaatttccagaagaacctgtcctcccggaaggataagatcgacctgctgttcgaggaaaacaacttcaagcccttcaagtacaacgacctgggcgccctggcctacctgggcagcgaaagagccattgccaccatcagaagcggcaagcggaccttctacaccggcggaggcctgatgaccttctacctgtggcggatcatctacatgagcatgatcctgagcgcccgcagcagactgaaggtgttcttcgactggatcaagctggccttcttcaagagggacttcttcaagggcctgtga

SEQ ID NO: 769 - DNA, 1542 bp, Artificial Sequence
  source: /note="Description of Artificial Sequence: Synthetic polynucleotide"
atgctgagcaagaacctgtacagcaacaagcggctgctgaccagcaccaacaccctcgtgcgcttcgccagcaccagatccaccggcgtcgaaaacagcggggctggccccaccagcttcaagaccatgaagatcatcgacccccagcacagcgacaagcccaacgtgctgatcctgggctctggctggggcgccatcagctttctgaagcacatcgacaccaagaagtacaacgtcagcatcgtgagccccagaagctacttcctgtacacccccctgctgcccagcgcccctgtgggaaccgtggacgagaagtccatcatcgagcccatcgtgaacttcgccctgaagaaaaagggcaacgtcacctactacgaggccgaggccaccagcatcaaccccgaccggaacaccgtgaccatcaagagcctgagcgccgtgtcccagctgtaccagcccgagaaccacctgggcctgcaccaggccgagcccgccgagattaagtacgactacctgatcagcgccgtgggcgccgagcccaacacctttggaatccccggcgtgaccgactacggccacttcctgaaagagatccccaacagcctggaaatccggcggaccttcgccgccaacctggaaaaggccaacctgctgcctaagggcgaccccgagcggagaaggctgctgagcatcgtggtcgtgggcggaggccccacaggcgtggaagctgctggcgagctgcaggactacgtgcaccaggacctgcggaagttcctgcccgccctggccgaggaagtgcagattcacctggtggaagccctgcccatcgtgctgaacatgttcgagaagaagctgagcagctacgcccagagccacctggaaaacacctccatcaaggtgcacctgagaaccgccgtggccaaggtggaagagaagcagctgctggccaagaccaagcacgaggacggcaagattaccgaggaaaccatcccctacggcaccctgatttgggccaccggcaacaaggccagacccgtgatcaccgacctgttcaagaagatccccgagcagaacagcagcaagcggggcctggccgtgaacgacttcctgcaggtcaaaggcagcaacaacatcttcgccatcggcgacaacgcctttgccggcctgcctcctacagcccaggtggcccaccaggaagccgagtacctggccaagaacttcgacaagatggcccagatccccaatttccagaagaacctgtcctcccggaaggataagatcgacctgctgttcgaggaaaacaacttcaagcccttcaagtacaacgacctgggcgccctggcctacctgggcagcgaaagagccattgccaccatcagaagcggcaagcggaccttctacaccggcggaggcctgatgaccttctacctgtggcggatcctgtacatgagcatgatcctgagcgcccgcagcagactgaaggtgttcttcgactggatcaagctggccttcttcaagagggacttcttcaagggcctgtga

SEQ ID NO: 770 - DNA, 1542 bp, Artificial Sequence
  source: /note="Description of Artificial Sequence: Synthetic polynucleotide"
atgctgagcaagaacctgtacagcaacaagcggctgctgaccagcaccaacaccctcgtgcgcttcgccagcaccagatccaccggcgtcgaaaacagcggggctggccccaccagcttcaagaccatgaagatcatcgacccccagcacagcgacaagcccaacgtgctgatcctgggctctggctggggcgccatcagctttctgaagcacatcgacaccaagaagtacaacgtcagcatcgtgagccccagaagctacttcctgtacacccccctgctgcccagcgcccctgtgggaaccgtggacgagaagtccatcatcgagcccatcgtgaacttcgccctgaagaaaaagggcaacgtcacctactacgaggccgaggccaccagcatcaaccccgaccggaacaccgtgaccatcaagagcctgagcgccgtgtcccagctgtaccagcccgagaaccacctgggcctgcaccaggccgagcccgccgagattaagtacgactacctgatcagcgccgtgggcgccgagcccaacacctttggaatccccggcgtgaccgactacggccacttcctgaaagagatccccaacagcctggaaatccggcggaccttcgccgccaacctggaaaaggccaacctgctgcctaagggcgaccccgagcggagaaggctgctgagcatcgtggtcgtgggcggaggccccacaggcgtggaagctgctggcgagctgcaggactacgtgcaccaggacctgcggaagttcctgcccgccctggccgaggaagtgcagattcacctggtggaagccctgcccatcgtgctgaacatgttcgagaagaagctgagcagctacgcccagagccacctggaaaacacctccatcaaggtgcacctgagaaccgccgtggccaaggtggaagagaagcagctgctggccaagaccaagcacgaggacggcaagattaccgaggaaaccatcccctacggcaccctgatttgggccaccggcaacaaggccagacccgtgatcaccgacctgttcaagaagatccccgagcagaacagcagcaagcggggcctggccgtgaacgacttcctgcaggtcaaaggcagcaacaacatcttcgccatcggcgacaacgcctttgccggcctgcctcctacagcccaggtggcccaccaggaagccgagtacctggccaagaacttcgacaagatggcccagatccccaatttccagaagaacctgtcctcccggaaggataagatcgacctgctgttcgaggaaaacaacttcaagcccttcaagtacaacgacctgggcgccctggcctacctgggcagcgaaagagccattgccaccatcagaagcggcaagcggaccttctacaccggcggaggcctgatgaccttctacctgtggcggatcatctacctgagcatgatcctgagcgcccgcagcagactgaaggtgttcttcgactggatcaagctggccttcttcaagagggacttcttcaagggcctgtga

SEQ ID NO: 771 - DNA, 1542 bp, Artificial Sequence
  source: /note="Description of Artificial Sequence: Synthetic polynucleotide"
atgctgagcaagaacctgtacagcaacaagcggctgctgaccagcaccaacaccctcgtgcgcttcgccagcaccagatccaccggcgtcgaaaacagcggggctggccccaccagcttcaagaccatgaaggtcatcgacccccagcacagcgacaagcccaacgtgctgatcctgggctctggctggggcgccatcagctttctgaagcacatcgacaccaagaagtacaacgtcagcatcgtgagccccagaagctacttcatcttcacccccctgctgcccagcgcccctgtgggaaccgtggacgagaagtccatcatcgagcccatcgtgaacttcgccctgaagaaaaagggcaacgtcacctactacgaggccgaggccaccagcatcaaccccgaccggaacaccgtgaccatcaagagcctgagcgccgtgtcccagctgtaccagcccgagaaccacctgggcctgcaccaggccgagcccgccgagattaagtacgactacctgatcagcgccgtgggcgccgagcccaacacctttggaatccccggcgtgaccgactacggccacttcctgaaagagatccccaacagcctggaaatccggcggaccttcgccgccaacctggaaaaggccaacctgctgcctaagggcgaccccgagcggagaaggctgctgagcatcgtggtcgtgggcggaggccccacaggcgtggaagctgctggcgagctgcaggactacgtgcaccaggacctgcggaagttcctgcccgccctggccgaggaaatccagattcacctggtggaagccctgcccatcgtgctgaacatgttcgagaagaagctgagcagctacgcccagagccacctggaaaacacctccatcaaggtgcacctgagaaccgccgtggccaaggtggaagagaagcagctgctggccaagaccaagcacgaggacggcaagattaccgaggaaaccatcccctacggcaccctgatttgggccaccggcaacaaggccagacccgtgatcaccgacctgttcaagaagatccccgagcagaacagcagcaagcggggcctggccgtgaacgacttcctgcaggtcaaaggcagcaacaacatcttcgccatcggcgacaacgcctttgccggcctgcctcctacagcccaggtggcccaccaggaagccgagtacctggccaagaacttcgacaagatggcccagatccccaatttccagaagaacctgtcctcccggaaggataagatcgacctgctgttcgaggaaaacaacttcaagcccttcaagtacaacgacctgggcgccctggcctacctgggcagcgaaagagccattgccaccatcagaagcggcaagcggaccttctacaccggcggaggcctgatgaccttctacctgtggcggatcctgtacatgagcatgatcctgagcgcccgcagcagactgaaggtgttcttcgactggatcaagctggccttcttcaagagggacttcttcaagggcctgtga

SEQ ID NO: 772 - DNA, 1542 bp, Artificial Sequence
  source: /note="Description of Artificial Sequence: Synthetic polynucleotide"
atgctgagcaagaacctgtacagcaacaagcggctgctgaccagcaccaacaccctcgtgcgcttcgccagcaccagatccaccggcgtcgaaaacagcggggctggccccaccagcttcaagaccatgaaggtcatcgacccccagcacagcgacaagcccaacgtgctgatcctgggctctggctggggcgccatcagctttctgaagcacatcgacaccaagaagtacaacgtcagcatcgtgagccccagaagctacttcatcttcacccccctgctgcccagcgcccctgtgggaaccgtggacgagaagtccatcatcgagcccatcgtgaacttcgccctgaagaaaaagggcaacgtcacctactacgaggccgaggccaccagcatcaaccccgaccggaacaccgtgaccatcaagagcctgagcgccgtgtcccagctgtaccagcccgagaaccacctgggcctgcaccaggccgagcccgccgagattaagtacgactacctgatcagcgccgtgggcgccgagcccaacacctttggaatccccggcgtgaccgactacggccacttcctgaaagagatccccaacagcctggaaatccggcggaccttcgccgccaacctggaaaaggccaacctgctgcctaagggcgaccccgagcggagaaggctgctgagcatcgtggtcgtgggcggaggccccacaggcgtggaagctgctggcgagctgcaggactacgtgcaccaggacctgcggaagttcctgcccgccctggccgaggaaatccagattcacctggtggaagccctgcccatcgtgctgaacatgttcgagaagaagctgagcagctacgcccagagccacctggaaaacacctccatcaaggtgcacctgagaaccgccgtggccaaggtggaagagaagcagctgctggccaagaccaagcacgaggacggcaagattaccgaggaaaccatcccctacggcaccctgatttgggccaccggcaacaaggccagacccgtgatcaccgacctgttcaagaagatccccgagcagaacagcagcaagcggggcctggccgtgaacgacttcctgcaggtcaaaggcagcaacaacatcttcgccatcggcgacaacgcctttgccggcctgcctcctacagcccaggtggcccaccaggaagccgagtacctggccaagaacttcgacaagatggcccagatccccaatttccagaagaacctgtcctcccggaaggataagatcgacctgctgttcgaggaaaacaacttcaagcccttcaagtacaacgacctgggcgccctggcctacctgggcagcgaaagagccattgccaccatcagaagcggcaagcggaccttctacaccggcggaggcctgatgaccttctacctgtggcggatcatctacctgagcatgatcctgagcgcccgcagcagactgaaggtgttcttcgactggatcaagctggccttcttcaagagggacttcttcaagggcctgtga

SEQ ID NO: 773 - DNA, 1542 bp, Artificial Sequence
  source: /note="Description of Artificial Sequence: Synthetic polynucleotide"
atgctgagcaagaacctgtacagcaacaagcggctgctgaccagcaccaacaccctcgtgcgcttcgccagcaccagatccaccggcgtcgaaaacagcggggctggccccaccagcttcaagaccatgaagatcatcgacccccagcacagcgacaagcccaacgtgctgatcctgggctctggctggggcgccatcagctttctgaagcacatcgacaccaagaagtacaacgtcagcatcgtgagccccagaagctacttcatcttcacccccctgctgcccagcgcccctgtgggaaccgtggacgagaagtccatcatcgagcccatcgtgaacttcgccctgaagaaaaagggcaacgtcacctactacgaggccgaggccaccagcatcaaccccgaccggaacaccgtgaccatcaagagcctgagcgccgtgtcccagctgtaccagcccgagaaccacctgggcctgcaccaggccgagcccgccgagattaagtacgactacctgatcagcgccgtgggcgccgagcccaacacctttggaatccccggcgtgaccgactacggccacttcctgaaagagatccccaacagcctggaaatccggcggaccttcgccgccaacctggaaaaggccaacctgctgcctaagggcgaccccgagcggagaaggctgctgagcatcgtggtcgtgggcggaggccccacaggcgtggaagctgctggcgagctgcaggactacgtgcaccaggacctgcggaagttcctgcccgccctggccgaggaaatccagattcacctggtggaagccctgcccatcgtgctgaacatgttcgagaagaagctgagcagctacgcccagagccacctggaaaacacctccatcaaggtgcacctgagaaccgccgtggccaaggtggaagagaagcagctgctggccaagaccaagcacgaggacggcaagattaccgaggaaaccatcccctacggcaccctgatttgggccaccggcaacaaggccagacccgtgatcaccgacctgttcaagaagatccccgagcagaacagcagcaagcggggcctggccgtgaacgacttcctgcaggtcaaaggcagcaacaacatcttcgccatcggcgacaacgcctttgccggcctgcctcctacagcccaggtggcccaccaggaagccgagtacctggccaagaacttcgacaagatggcccagatccccaatttccagaagaacctgtcctcccggaaggataagatcgacctgctgttcgaggaaaacaacttcaagcccttcaagtacaacgacctgggcgccctggcctacctgggcagcgaaagagccattgccaccatcagaagcggcaagcggaccttctacaccggcggaggcctgatgaccttctacctgtggcggatcctgtacctgagcatgatcctgagcgcccgcagcagactgaaggtgttcttcgactggatcaagctggccttcttcaagagggacttcttcaagggcctgtga

SEQ ID NO: 774 - DNA, 1542 bp, Artificial Sequence
  source: /note="Description of Artificial Sequence: Synthetic polynucleotide"
atgctgagcaagaacctgtacagcaacaagcggctgctgaccagcaccaacaccctcgtgcgcttcgccagcaccagatccaccggcgtcgaaaacagcggggctggccccaccagcttcaagaccatgaaggtcatcgacccccagcacagcgacaagcccaacgtgctgatcctgggctctggctggggcgccatcagctttctgaagcacatcgacaccaagaagtacaacgtcagcatcgtgagccccagaagctacttcatcttcacccccctgctgcccagcgcccctgtgggaaccgtggacgagaagtccatcatcgagcccatcgtgaacttcgccctgaagaaaaagggcaacgtcacctactacgaggccgaggccaccagcatcaaccccgaccggaacaccgtgaccatcaagagcctgagcgccgtgtcccagctgtaccagcccgagaaccacctgggcctgcaccaggccgagcccgccgagattaagtacgactacctgatcagcgccgtgggcgccgagcccaacacctttggaatccccggcgtgaccgactacggccacttcctgaaagagatccccaacagcctggaaatccggcggaccttcgccgccaacctggaaaaggccaacctgctgcctaagggcgaccccgagcggagaaggctgctgagcatcgtggtcgtgggcggaggccccacaggcgtggaagctgctggcgagctgcaggactacgtgcaccaggacctgcggaagttcctgcccgccctggccgaggaagtgcagattcacctggtggaagccctgcccatcgtgctgaacatgttcgagaagaagctgagcagctacgcccagagccacctggaaaacacctccatcaaggtgcacctgagaaccgccgtggccaaggtggaagagaagcagctgctggccaagaccaagcacgaggacggcaagattaccgaggaaaccatcccctacggcaccctgatttgggccaccggcaacaaggccagacccgtgatcaccgacctgttcaagaagatccccgagcagaacagcagcaagcggggcctggccgtgaacgacttcctgcaggtcaaaggcagcaacaacatcttcgccatcggcgacaacgcctttgccggcctgcctcctacagcccaggtggcccaccaggaagccgagtacctggccaagaacttcgacaagatggcccagatccccaatttccagaagaacctgtcctcccggaaggataagatcgacctgctgttcgaggaaaacaacttcaagcccttcaagtacaacgacctgggcgccctggcctacctgggcagcgaaagagccattgccaccatcagaagcggcaagcggaccttctacaccggcggaggcctgatgaccttctacctgtggcggatcatctacatgagcatgatcctgagcgcccgcagcagactgaaggtgttcttcgactggatcaagctggccttcttcaagagggacttcttcaagggcctgtga

SEQ ID NO: 775 - DNA, 1542 bp, Artificial Sequence
  source: /note="Description of Artificial Sequence: Synthetic polynucleotide"
atgctgagcaagaacctgtacagcaacaagcggctgctgaccagcaccaacaccctcgtgcgcttcgccagcaccagatccaccggcgtcgaaaacagcggggctggccccaccagcttcaagaccatgaagatcatcgacccccagcacagcgacaagcccaacgtgctgatcctgggctctggctggggcgccatcagctttctgaagcacatcgacaccaagaagtacaacgtcagcatcgtgagccccagaagctacttcatcttcacccccctgctgcccagcgcccctgtgggaaccgtggacgagaagtccatcatcgagcccatcgtgaacttcgccctgaagaaaaagggcaacgtcacctactacgaggccgaggccaccagcatcaaccccgaccggaacaccgtgaccatcaagagcctgagcgccgtgtcccagctgtaccagcccgagaaccacctgggcctgcaccaggccgagcccgccgagattaagtacgactacctgatcagcgccgtgggcgccgagcccaacacctttggaatccccggcgtgaccgactacggccacttcctgaaagagatccccaacagcctggaaatccggcggaccttcgccgccaacctggaaaaggccaacctgctgcctaagggcgaccccgagcggagaaggctgctgagcatcgtggtcgtgggcggaggccccacaggcgtggaagctgctggcgagctgcaggactacgtgcaccaggacctgcggaagttcctgcccgccctggccgaggaagtgcagattcacctggtggaagccctgcccatcgtgctgaacatgttcgagaagaagctgagcagctacgcccagagccacctggaaaacacctccatcaaggtgcacctgagaaccgccgtggccaaggtggaagagaagcagctgctggccaagaccaagcacgaggacggcaagattaccgaggaaaccatcccctacggcaccctgatttgggccaccggcaacaaggccagacccgtgatcaccgacctgttcaagaagatccccgagcagaacagcagcaagcggggcctggccgtgaacgacttcctgcaggtcaaaggcagcaacaacatcttcgccatcggcgacaacgcctttgccggcctgcctcctacagcccaggtggcccaccaggaagccgagtacctggccaagaacttcgacaagatggcccagatccccaatttccagaagaacctgtcctcccggaaggataagatcgacctgctgttcgaggaaaacaacttcaagcccttcaagtacaacgacctgggcgccctggcctacctgggcagcgaaagagccattgccaccatcagaagcggcaagcggaccttctacaccggcggaggcctgatgaccttctacctgtggcggatcctgtacatgagcatgatcctgagcgcccgcagcagactgaaggtgttcttcgactggatcaagctggccttcttcaagagggacttcttcaagggcctgtga

SEQ ID NO: 776 - DNA, 1542 bp, Artificial Sequence
  source: /note="Description of Artificial Sequence: Synthetic polynucleotide"
atgctgagcaagaacctgtacagcaacaagcggctgctgaccagcaccaacaccctcgtgcgcttcgccagcaccagatccaccggcgtcgaaaacagcggggctggccccaccagcttcaagaccatgaagatcatcgacccccagcacagcgacaagcccaacgtgctgatcctgggctctggctggggcgccatcagctttctgaagcacatcgacaccaagaagtacaacgtcagcatcgtgagccccagaagctacttcatcttcacccccctgctgcccagcgcccctgtgggaaccgtggacgagaagtccatcatcgagcccatcgtgaacttcgccctgaagaaaaagggcaacgtcacctactacgaggccgaggccaccagcatcaaccccgaccggaacaccgtgaccatcaagagcctgagcgccgtgtcccagctgtaccagcccgagaaccacctgggcctgcaccaggccgagcccgccgagattaagtacgactacctgatcagcgccgtgggcgccgagcccaacacctttggaatccccggcgtgaccgactacggccacttcctgaaagagatccccaacagcctggaaatccggcggaccttcgccgccaacctggaaaaggccaacctgctgcctaagggcgaccccgagcggagaaggctgctgagcatcgtggtcgtgggcggaggccccacaggcgtggaagctgctggcgagctgcaggactacgtgcaccaggacctgcggaagttcctgcccgccctggccgaggaagtgcagattcacctggtggaagccctgcccatcgtgctgaacatgttcgagaagaagctgagcagctacgcccagagccacctggaaaacacctccatcaaggtgcacctgagaaccgccgtggccaaggtggaagagaagcagctgctggccaagaccaagcacgaggacggcaagattaccgaggaaaccatcccctacggcaccctgatttgggccaccggcaacaaggccagacccgtgatcaccgacctgttcaagaagatccccgagcagaacagcagcaagcggggcctggccgtgaacgacttcctgcaggtcaaaggcagcaacaacatcttcgccatcggcgacaacgcctttgccggcctgcctcctacagcccaggtggcccaccaggaagccgagtacctggccaagaacttcgacaagatggcccagatccccaatttccagaagaacctgtcctcccggaaggataagatcgacctgctgttcgaggaaaacaacttcaagcccttcaagtacaacgacctgggcgccctggcctacctgggcagcgaaagagccattgccaccatcagaagcggcaagcggaccttctacaccggcggaggcctgatgaccttctacctgtggcggatcatctacctgagcatgatcctgagcgcccgcagcagactgaaggtgttcttcgactggatcaagctggccttcttcaagagggacttcttcaagggcctgtga

SEQ ID NO: 777 - DNA, 1542 bp, Artificial Sequence
  source: /note="Description of Artificial Sequence: Synthetic polynucleotide"
atgctgagcaagaacctgtacagcaacaagcggctgctgaccagcaccaacaccctcgtgcgcttcgccagcaccagatccaccggcgtcgaaaacagcggggctggccccaccagcttcaagaccatgaaggtcatcgacccccagcacagcgacaagcccaacgtgctgatcctgggctctggctggggcgccatcagctttctgaagcacatcgacaccaagaagtacaacgtcagcatcgtgagccccagaagctacttcctgttcacccccctgctgcccagcgcccctgtgggaaccgtggacgagaagtccatcatcgagcccatcgtgaacttcgccctgaagaaaaagggcaacgtcacctactacgaggccgaggccaccagcatcaaccccgaccggaacaccgtgaccatcaagagcctgagcgccgtgtcccagctgtaccagcccgagaaccacctgggcctgcaccaggccgagcccgccgagattaagtacgactacctgatcagcgccgtgggcgccgagcccaacacctttggaatccccggcgtgaccgactacggccacttcctgaaagagatccccaacagcctggaaatccggcggaccttcgccgccaacctggaaaaggccaacctgctgcctaagggcgaccccgagcggagaaggctgctgagcatcgtggtcgtgggcggaggccccacaggcgtggaagctgctggcgagctgcaggactacgtgcaccaggacctgcggaagttcctgcccgccctggccgaggaaatccagattcacctggtggaagccctgcccatcgtgctgaacatgttcgagaagaagctgagcagctacgcccagagccacctggaaaacacctccatcaaggtgcacctgagaaccgccgtggccaaggtggaagagaagcagctgctggccaagaccaagcacgaggacggcaagattaccgaggaaaccatcccctacggcaccctgatttgggccaccggcaacaaggccagacccgtgatcaccgacctgttcaagaagatccccgagcagaacagcagcaagcggggcctggccgtgaacgacttcctgcaggtcaaaggcagcaacaacatcttcgccatcggcgacaacgcctttgccggcctgcctcctacagcccaggtggcccaccaggaagccgagtacctggccaagaacttcgacaagatggcccagatccccaatttccagaagaacctgtcctcccggaaggataagatcgacctgctgttcgaggaaaacaacttcaagcccttcaagtacaacgacctgggcgccctggcctacctgggcagcgaaagagccattgccaccatcagaagcggcaagcggaccttctacaccggcggaggcctgatgaccttctacctgtggcggatcatctacatgagcatgatcctgagcgcccgcagcagactgaaggtgttcttcgactggatcaagctggccttcttcaagagggacttcttcaagggcctgtga

SEQ ID NO: 778 - DNA, 1542 bp, Artificial Sequence
  source: /note="Description of Artificial Sequence: Synthetic polynucleotide"
atgctgagcaagaacctgtacagcaacaagcggctgctgaccagcaccaacaccctcgtgcgcttcgccagcaccagatccaccggcgtcgaaaacagcggggctggccccaccagcttcaagaccatgaagatcatcgacccccagcacagcgacaagcccaacgtgctgatcctgggctctggctggggcgccatcagctttctgaagcacatcgacaccaagaagtacaacgtcagcatcgtgagccccagaagctacttcctgttcacccccctgctgcccagcgcccctgtgggaaccgtggacgagaagtccatcatcgagcccatcgtgaacttcgccctgaagaaaaagggcaacgtcacctactacgaggccgaggccaccagcatcaaccccgaccggaacaccgtgaccatcaagagcctgagcgccgtgtcccagctgtaccagcccgagaaccacctgggcctgcaccaggccgagcccgccgagattaagtacgactacctgatcagcgccgtgggcgccgagcccaacacctttggaatccccggcgtgaccgactacggccacttcctgaaagagatccccaacagcctggaaatccggcggaccttcgccgccaacctggaaaaggccaacctgctgcctaagggcgaccccgagcggagaaggctgctgagcatcgtggtcgtgggcggaggccccacaggcgtggaagctgctggcgagctgcaggactacgtgcaccaggacctgcggaagttcctgcccgccctggccgaggaaatccagattcacctggtggaagccctgcccatcgtgctgaacatgttcgagaagaagctgagcagctacgcccagagccacctggaaaacacctccatcaaggtgcacctgagaaccgccgtggccaaggtggaagagaagcagctgctggccaagaccaagcacgaggacggcaagattaccgaggaaaccatcccctacggcaccctgatttgggccaccggcaacaaggccagacccgtgatcaccgacctgttcaagaagatccccgagcagaacagcagcaagcggggcctggccgtgaacgacttcctgcaggtcaaaggcagcaacaacatcttcgccatcggcgacaacgcctttgccggcctgcctcctacagcccaggtggcccaccaggaagccgagtacctggccaagaacttcgacaagatggcccagatccccaatttccagaagaacctgtcctcccggaaggataagatcgacctgctgttcgaggaaaacaacttcaagcccttcaagtacaacgacctgggcgccctggcctacctgggcagcgaaagagccattgccaccatcagaagcggcaagcggaccttctacaccggcggaggcctgatgaccttctacctgtggcggatcctgtacatgagcatgatcctgagcgcccgcagcagactgaaggtgttcttcgactggatcaagctggccttcttcaagagggacttcttcaagggcctgtga

SEQ ID NO: 779 - DNA, 1542 bp, Artificial Sequence
  source: /note="Description of Artificial Sequence: Synthetic polynucleotide"
atgctgagcaagaacctgtacagcaacaagcggctgctgaccagcaccaacaccctcgtgcgcttcgccagcaccagatccaccggcgtcgaaaacagcggggctggccccaccagcttcaagaccatgaagatcatcgacccccagcacagcgacaagcccaacgtgctgatcctgggctctggctggggcgccatcagctttctgaagcacatcgacaccaagaagtacaacgtcagcatcgtgagccccagaagctacttcctgttcacccccctgctgcccagcgcccctgtgggaaccgtggacgagaagtccatcatcgagcccatcgtgaacttcgccctgaagaaaaagggcaacgtcacctactacgaggccgaggccaccagcatcaaccccgaccggaacaccgtgaccatcaagagcctgagcgccgtgtcccagctgtaccagcccgagaaccacctgggcctgcaccaggccgagcccgccgagattaagtacgactacctgatcagcgccgtgggcgccgagcccaacacctttggaatccccggcgtgaccgactacggccacttcctgaaagagatccccaacagcctggaaatccggcggaccttcgccgccaacctggaaaaggccaacctgctgcctaagggcgaccccgagcggagaaggctgctgagcatcgtggtcgtgggcggaggccccacaggcgtggaagctgctggcgagctgcaggactacgtgcaccaggacctgcggaagttcctgcccgccctggccgaggaaatccagattcacctggtggaagccctgcccatcgtgctgaacatgttcgagaagaagctgagcagctacgcccagagccacctggaaaacacctccatcaaggtgcacctgagaaccgccgtggccaaggtggaagagaagcagctgctggccaagaccaagcacgaggacggcaagattaccgaggaaaccatcccctacggcaccctgatttgggccaccggcaacaaggccagacccgtgatcaccgacctgttcaagaagatccccgagcagaacagcagcaagcggggcctggccgtgaacgacttcctgcaggtcaaaggcagcaacaacatcttcgccatcggcgacaacgcctttgccggcctgcctcctacagcccaggtggcccaccaggaagccgagtacctggccaagaacttcgacaagatggcccagatccccaatttccagaagaacctgtcctcccggaaggataagatcgacctgctgttcgaggaaaacaacttcaagcccttcaagtacaacgacctgggcgccctggcctacctgggcagcgaaagagccattgccaccatcagaagcggcaagcggaccttctacaccggcggaggcctgatgaccttctacctgtggcggatcatctacctgagcatgatcctgagcgcccgcagcagactgaaggtgttcttcgactggatcaagctggccttcttcaagagggacttcttcaagggcctgtga

SEQ ID NO: 780 - DNA, 1542 bp, Artificial Sequence
  source: /note="Description of Artificial Sequence: Synthetic polynucleotide"
atgctgagcaagaacctgtacagcaacaagcggctgctgaccagcaccaacaccctcgtgcgcttcgccagcaccagatccaccggcgtcgaaaacagcggggctggccccaccagcttcaagaccatgaagatcatcgacccccagcacagcgacaagcccaacgtgctgatcctgggctctggctggggcgccatcagctttctgaagcacatcgacaccaagaagtacaacgtcagcatcgtgagccccagaagctacttcctgttcacccccctgctgcccagcgcccctgtgggaaccgtggacgagaagtccatcatcgagcccatcgtgaacttcgccctgaagaaaaagggcaacgtcacctactacgaggccgaggccaccagcatcaaccccgaccggaacaccgtgaccatcaagagcctgagcgccgtgtcccagctgtaccagcccgagaaccacctgggcctgcaccaggccgagcccgccgagattaagtacgactacctgatcagcgccgtgggcgccgagcccaacacctttggaatccccggcgtgaccgactacggccacttcctgaaagagatccccaacagcctggaaatccggcggaccttcgccgccaacctggaaaaggccaacctgctgcctaagggcgaccccgagcggagaaggctgctgagcatcgtggtcgtgggcggaggccccacaggcgtggaagctgctggcgagctgcaggactacgtgcaccaggacctgcggaagttcctgcccgccctggccgaggaagtgcagattcacctggtggaagccctgcccatcgtgctgaacatgttcgagaagaagctgagcagctacgcccagagccacctggaaaacacctccatcaaggtgcacctgagaaccgccgtggccaaggtggaagagaagcagctgctggccaagaccaagcacgaggacggcaagattaccgaggaaaccatcccctacggcaccctgatttgggccaccggcaacaaggccagacccgtgatcaccgacctgttcaagaagatccccgagcagaacagcagcaagcggggcctggccgtgaacgacttcctgcaggtcaaaggcagcaacaacatcttcgccatcggcgacaacgcctttgccggcctgcctcctacagcccaggtggcccaccaggaagccgagtacctggccaagaacttcgacaagatggcccagatccccaatttccagaagaacctgtcctcccggaaggataagatcgacctgctgttcgaggaaaacaacttcaagcccttcaagtacaacgacctgggcgccctggcctacctgggcagcgaaagagccattgccaccatcagaagcggcaagcggaccttctacaccggcggaggcctgatgaccttctacctgtggcggatcatctacatgagcatgatcctgagcgcccgcagcagactgaaggtgttcttcgactggatcaagctggccttcttcaagagggacttcttcaagggcctgtga

SEQ ID NO: 781 - DNA, 1542 bp, Artificial Sequence
  source: /note="Description of Artificial Sequence: Synthetic polynucleotide"
atgctgagcaagaacctgtacagcaacaagcggctgctgaccagcaccaacaccctcgtgcgcttcgccagcaccagatccaccggcgtcgaaaacagcggggctggccccaccagcttcaagaccatgaaggtcatcgacccccagcacagcgacaagcccaacgtgctgatcctgggctctggctggggcgccatcagctttctgaagcacatcgacaccaagaagtacaacgtcagcatcatcagccccagaagctacttcatctacacccccctgctgcccagcgcccctgtgggaaccgtggacgagaagtccatcatcgagcccatcgtgaacttcgccctgaagaaaaagggcaacgtcacctactacgaggccgaggccaccagcatcaaccccgaccggaacaccgtgaccatcaagagcctgagcgccgtgtcccagctgtaccagcccgagaaccacctgggcctgcaccaggccgagcccgccgagattaagtacgactacctgatcagcgccgtgggcgccgagcccaacacctttggaatccccggcgtgaccgactacggccacttcctgaaagagatccccaacagcctggaaatccggcggaccttcgccgccaacctggaaaaggccaacctgctgcctaagggcgaccccgagcggagaaggctgctgagcatcgtggtcgtgggcggaggccccacaggcgtggaagctgctggcgagctgcaggactacgtgcaccaggacctgcggaagttcctgcccgccctggccgaggaaatccagattcacctggtggaagccctgcccatcgtgctgaacatgttcgagaagaagctgagcagctacgcccagagccacctggaaaacacctccatcaaggtgcacctgagaaccgccgtggccaaggtggaagagaagcagctgctggccaagaccaagcacgaggacggcaagattaccgaggaaaccatcccctacggcaccctgatttgggccaccggcaacaaggccagacccgtgatcaccgacctgttcaagaagatccccgagcagaacagcagcaagcggggcctggccgtgaacgacttcctgcaggtcaaaggcagcaacaacatcttcgccatcggcgacaacgcctttgccggcctgcctcctacagcccaggtggcccaccaggaagccgagtacctggccaagaacttcgacaagatggcccagatccccaatttccagaagaacctgtcctcccggaaggataagatcgacctgctgttcgaggaaaacaacttcaagcccttcaagtacaacgacctgggcgccctggcctacctgggcagcgaaagagccattgccaccatcagaagcggcaagcggaccttctacaccggcggaggcctgatgaccttctacctgtggcggatcctgtacatgagcatgatcctgagcgcccgcagcagactgaaggtgttcttcgactggatcaagctggccttcttcaagagggacttcttcaagggcctgtga

SEQ ID NO: 782 - DNA, 1542 bp, Artificial Sequence
  source: /note="Description of Artificial Sequence: Synthetic polynucleotide"
atgctgagcaagaacctgtacagcaacaagcggctgctgaccagcaccaacaccctcgtgcgcttcgccagcaccagatccaccggcgtcgaaaacagcggggctggccccaccagcttcaagaccatgaaggtcatcgacccccagcacagcgacaagcccaacgtgctgatcctgggctctggctggggcgccatcagctttctgaagcacatcgacaccaagaagtacaacgtcagcatcatcagccccagaagctacttcatctacacccccctgctgcccagcgcccctgtgggaaccgtggacgagaagtccatcatcgagcccatcgtgaacttcgccctgaagaaaaagggcaacgtcacctactacgaggccgaggccaccagcatcaaccccgaccggaacaccgtgaccatcaagagcctgagcgccgtgtcccagctgtaccagcccgagaaccacctgggcctgcaccaggccgagcccgccgagattaagtacgactacctgatcagcgccgtgggcgccgagcccaacacctttggaatccccggcgtgaccgactacggccacttcctgaaagagatccccaacagcctggaaatccggcggaccttcgccgccaacctggaaaaggccaacctgctgcctaagggcgaccccgagcggagaaggctgctgagcatcgtggtcgtgggcggaggccccacaggcgtggaagctgctggcgagctgcaggactacgtgcaccaggacctgcggaagttcctgcccgccctggccgaggaaatccagattcacctggtggaagccctgcccatcgtgctgaacatgttcgagaagaagctgagcagctacgcccagagccacctggaaaacacctccatcaaggtgcacctgagaaccgccgtggccaaggtggaagagaagcagctgctggccaagaccaagcacgaggacggcaagattaccgaggaaaccatcccctacggcaccctgatttgggccaccggcaacaaggccagacccgtgatcaccgacctgttcaagaagatccccgagcagaacagcagcaagcggggcctggccgtgaacgacttcctgcaggtcaaaggcagcaacaacatcttcgccatcggcgacaacgcctttgccggcctgcctcctacagcccaggtggcccaccaggaagccgagtacctggccaagaacttcgacaagatggcccagatccccaatttccagaagaacctgtcctcccggaaggataagatcgacctgctgttcgaggaaaacaacttcaagcccttcaagtacaacgacctgggcgccctggcctacctgggcagcgaaagagccattgccaccatcagaagcggcaagcggaccttctacaccggcggaggcctgatgaccttctacctgtggcggatcatctacctgagcatgatcctgagcgcccgcagcagactgaaggtgttcttcgactggatcaagctggccttcttcaagagggacttcttcaagggcctgtga

SEQ ID NO: 783 - DNA, 1542 bp, Artificial Sequence
  source: /note="Description of Artificial Sequence: Synthetic polynucleotide"
atgctgagcaagaacctgtacagcaacaagcggctgctgaccagcaccaacaccctcgtgcgcttcgccagcaccagatccaccggcgtcgaaaacagcggggctggccccaccagcttcaagaccatgaagatcatcgacccccagcacagcgacaagcccaacgtgctgatcctgggctctggctggggcgccatcagctttctgaagcacatcgacaccaagaagtacaacgtcagcatcatcagccccagaagctacttcatctacacccccctgctgcccagcgcccctgtgggaaccgtggacgagaagtccatcatcgagcccatcgtgaacttcgccctgaagaaaaagggcaacgtcacctactacgaggccgaggccaccagcatcaaccccgaccggaacaccgtgaccatcaagagcctgagcgccgtgtcccagctgtaccagcccgagaaccacctgggcctgcaccaggccgagcccgccgagattaagtacgactacctgatcagcgccgtgggcgccgagcccaacacctttggaatccccggcgtgaccgactacggccacttcctgaaagagatccccaacagcctggaaatccggcggaccttcgccgccaacctggaaaaggccaacctgctgcctaagggcgaccccgagcggagaaggctgctgagcatcgtggtcgtgggcggaggccccacaggcgtggaagctgctggcgagctgcaggactacgtgcaccaggacctgcggaagttcctgcccgccctggccgaggaaatccagattcacctggtggaagccctgcccatcgtgctgaacatgttcgagaagaagctgagcagctacgcccagagccacctggaaaacacctccatcaaggtgcacctgagaaccgccgtggccaaggtggaagagaagcagctgctggccaagaccaagcacgaggacggcaagattaccgaggaaaccatcccctacggcaccctgatttgggccaccggcaacaaggccagacccgtgatcaccgacctgttcaagaagatccccgagcagaacagcagcaagcggggcctggccgtgaacgacttcctgcaggtcaaaggcagcaacaacatcttcgccatcggcgacaacgcctttgccggcctgcctcctacagcccaggtggcccaccaggaagccgagtacctggccaagaacttcgacaagatggcccagatccccaatttccagaagaacctgtcctcccggaaggataagatcgacctgctgttcgaggaaaacaacttcaagcccttcaagtacaacgacctgggcgccctggcctacctgggcagcgaaagagccattgccaccatcagaagcggcaagcggaccttctacaccggcggaggcctgatgaccttctacctgtggcggatcctgtacctgagcatgatcctgagcgcccgcagcagactgaaggtgttcttcgactggatcaagctggccttcttcaagagggacttcttcaagggcctgtga

SEQ ID NO: 784 - DNA, 1542 bp, Artificial Sequence
  source: /note="Description of Artificial Sequence: Synthetic polynucleotide"
atgctgagcaagaacctgtacagcaacaagcggctgctgaccagcaccaacaccctcgtgcgcttcgccagcaccagatccaccggcgtcgaaaacagcggggctggccccaccagcttcaagaccatgaaggtcatcgacccccagcacagcgacaagcccaacgtgctgatcctgggctctggctggggcgccatcagctttctgaagcacatcgacaccaagaagtacaacgtcagcatcatcagccccagaagctacttcatctacacccccctgctgcccagcgcccctgtgggaaccgtggacgagaagtccatcatcgagcccatcgtgaacttcgccctgaagaaaaagggcaacgtcacctactacgaggccgaggccaccagcatcaaccccgaccggaacaccgtgaccatcaagagcctgagcgccgtgtcccagctgtaccagcccgagaaccacctgggcctgcaccaggccgagcccgccgagattaagtacgactacctgatcagcgccgtgggcgccgagcccaacacctttggaatccccggcgtgaccgactacggccacttcctgaaagagatccccaacagcctggaaatccggcggaccttcgccgccaacctggaaaaggccaacctgctgcctaagggcgaccccgagcggagaaggctgctgagcatcgtggtcgtgggcggaggccccacaggcgtggaagctgctggcgagctgcaggactacgtgcaccaggacctgcggaagttcctgcccgccctggccgaggaagtgcagattcacctggtggaagccctgcccatcgtgctgaacatgttcgagaagaagctgagcagctacgcccagagccacctggaaaacacctccatcaaggtgcacctgagaaccgccgtggccaaggtggaagagaagcagctgctggccaagaccaagcacgaggacggcaagattaccgaggaaaccatcccctacggcaccctgatttgggccaccggcaacaaggccagacccgtgatcaccgacctgttcaagaagatccccgagcagaacagcagcaagcggggcctggccgtgaacgacttcctgcaggtcaaaggcagcaacaacatcttcgccatcggcgacaacgcctttgccggcctgcctcctacagcccaggtggcccaccaggaagccgagtacctggccaagaacttcgacaagatggcccagatccccaatttccagaagaacctgtcctcccggaaggataagatcgacctgctgttcgaggaaaacaacttcaagcccttcaagtacaacgacctgggcgccctggcctacctgggcagcgaaagagccattgccaccatcagaagcggcaagcggaccttctacaccggcggaggcctgatgaccttctacctgtggcggatcatctacatgagcatgatcctgagcgcccgcagcagactgaaggtgttcttcgactggatcaagctggccttcttcaagagggacttcttcaagggcctgtga

SEQ ID NO: 785 - DNA, 1542 bp, Artificial Sequence
  source: /note="Description of Artificial Sequence: Synthetic polynucleotide"
atgctgagcaagaacctgtacagcaacaagcggctgctgaccagcaccaacaccctcgtgcgcttcgccagcaccagatccaccggcgtcgaaaacagcggggctggccccaccagcttcaagaccatgaagatcatcgacccccagcacagcgacaagcccaacgtgctgatcctgggctctggctggggcgccatcagctttctgaagcacatcgacaccaagaagtacaacgtcagcatcatcagccccagaagctacttcatctacacccccctgctgcccagcgcccctgtgggaaccgtggacgagaagtccatcatcgagcccatcgtgaacttcgccctgaagaaaaagggcaacgtcacctactacgaggccgaggccaccagcatcaaccccgaccggaacaccgtgaccatcaagagcctgagcgccgtgtcccagctgtaccagcccgagaaccacctgggcctgcaccaggccgagcccgccgagattaagtacgactacctgatcagcgccgtgggcgccgagcccaacacctttggaatccccggcgtgaccgactacggccacttcctgaaagagatccccaacagcctggaaatccggcggaccttcgccgccaacctggaaaaggccaacctgctgcctaagggcgaccccgagcggagaaggctgctgagcatcgtggtcgtgggcggaggccccacaggcgtggaagctgctggcgagctgcaggactacgtgcaccaggacctgcggaagttcctgcccgccctggccgaggaagtgcagattcacctggtggaagccctgcccatcgtgctgaacatgttcgagaagaagctgagcagctacgcccagagccacctggaaaacacctccatcaaggtgcacctgagaaccgccgtggccaaggtggaagagaagcagctgctggccaagaccaagcacgaggacggcaagattaccgaggaaaccatcccctacggcaccctgatttgggccaccggcaacaaggccagacccgtgatcaccgacctgttcaagaagatccccgagcagaacagcagcaagcggggcctggccgtgaacgacttcctgcaggtcaaaggcagcaacaacatcttcgccatcggcgacaacgcctttgccggcctgcctcctacagcccaggtggcccaccaggaagccgagtacctggccaagaacttcgacaagatggcccagatccccaatttccagaagaacctgtcctcccggaaggataagatcgacctgctgttcgaggaaaacaacttcaagcccttcaagtacaacgacctgggcgccctggcctacctgggcagcgaaagagccattgccaccatcagaagcggcaagcggaccttctacaccggcggaggcctgatgaccttctacctgtggcggatcctgtacatgagcatgatcctgagcgcccgcagcagactgaaggtgttcttcgactggatcaagctggccttcttcaagagggacttcttcaagggcctgtga

SEQ ID NO: 786 - DNA, 1542 bp, Artificial Sequence
  source: /note="Description of Artificial Sequence: Synthetic polynucleotide"
atgctgagcaagaacctgtacagcaacaagcggctgctgaccagcaccaacaccctcgtgcgcttcgccagcaccagatccaccggcgtcgaaaacagcggggctggccccaccagcttcaagaccatgaagatcatcgacccccagcacagcgacaagcccaacgtgctgatcctgggctctggctggggcgccatcagctttctgaagcacatcgacaccaagaagtacaacgtcagcatcatcagccccagaagctacttcatctacacccccctgctgcccagcgcccctgtgggaaccgtggacgagaagtccatcatcgagcccatcgtgaacttcgccctgaagaaaaagggcaacgtcacctactacgaggccgaggccaccagcatcaaccccgaccggaacaccgtgaccatcaagagcctgagcgccgtgtcccagctgtaccagcccgagaaccacctgggcctgcaccaggccgagcccgccgagattaagtacgactacctgatcagcgccgtgggcgccgagcccaacacctttggaatccccggcgtgaccgactacggccacttcctgaaagagatccccaacagcctggaaatccggcggaccttcgccgccaacctggaaaaggccaacctgctgcctaagggcgaccccgagcggagaaggctgctgagcatcgtggtcgtgggcggaggccccacaggcgtggaagctgctggcgagctgcaggactacgtgcaccaggacctgcggaagttcctgcccgccctggccgaggaagtgcagattcacctggtggaagccctgcccatcgtgctgaacatgttcgagaagaagctgagcagctacgcccagagccacctggaaaacacctccatcaaggtgcacctgagaaccgccgtggccaaggtggaagagaagcagctgctggccaagaccaagcacgaggacggcaagattaccgaggaaaccatcccctacggcaccctgatttgggccaccggcaacaaggccagacccgtgatcaccgacctgttcaagaagatccccgagcagaacagcagcaagcggggcctggccgtgaacgacttcctgcaggtcaaaggcagcaacaacatcttcgccatcggcgacaacgcctttgccggcctgcctcctacagcccaggtggcccaccaggaagccgagtacctggccaagaacttcgacaagatggcccagatccccaatttccagaagaacctgtcctcccggaaggataagatcgacctgctgttcgaggaaaacaacttcaagcccttcaagtacaacgacctgggcgccctggcctacctgggcagcgaaagagccattgccaccatcagaagcggcaagcggaccttctacaccggcggaggcctgatgaccttctacctgtggcggatcatctacctgagcatgatcctgagcgcccgcagcagactgaaggtgttcttcgactggatcaagctggccttcttcaagagggacttcttcaagggcctgtga

SEQ ID NO: 787 - DNA, 1542 bp, Artificial Sequence
  source: /note="Description of Artificial Sequence: Synthetic polynucleotide"
atgctgagcaagaacctgtacagcaacaagcggctgctgaccagcaccaacaccctcgtgcgcttcgccagcaccagatccaccggcgtcgaaaacagcggggctggccccaccagcttcaagaccatgaaggtcatcgacccccagcacagcgacaagcccaacgtgctgatcctgggctctggctggggcgccatcagctttctgaagcacatcgacaccaagaagtacaacgtcagcatcatcagccccagaagctacttcctgtacacccccctgctgcccagcgcccctgtgggaaccgtggacgagaagtccatcatcgagcccatcgtgaacttcgccctgaagaaaaagggcaacgtcacctactacgaggccgaggccaccagcatcaaccccgaccggaacaccgtgaccatcaagagcctgagcgccgtgtcccagctgtaccagcccgagaaccacctgggcctgcaccaggccgagcccgccgagattaagtacgactacctgatcagcgccgtgggcgccgagcccaacacctttggaatccccggcgtgaccgactacggccacttcctgaaagagatccccaacagcctggaaatccggcggaccttcgccgccaacctggaaaaggccaacctgctgcctaagggcgaccccgagcggagaaggctgctgagcatcgtggtcgtgggcggaggccccacaggcgtggaagctgctggcgagctgcaggactacgtgcaccaggacctgcggaagttcctgcccgccctggccgaggaaatccagattcacctggtggaagccctgcccatcgtgctgaacatgttcgagaagaagctgagcagctacgcccagagccacctggaaaacacctccatcaaggtgcacctgagaaccgccgtggccaaggtggaagagaagcagctgctggccaagaccaagcacgaggacggcaagattaccgaggaaaccatcccctacggcaccctgatttgggccaccggcaacaaggccagacccgtgatcaccgacctgttcaagaagatccccgagcagaacagcagcaagcggggcctggccgtgaacgacttcctgcaggtcaaaggcagcaacaacatcttcgccatcggcgacaacgcctttgccggcctgcctcctacagcccaggtggcccaccaggaagccgagtacctggccaagaacttcgacaagatggcccagatccccaatttccagaagaacctgtcctcccggaaggataagatcgacctgctgttcgaggaaaacaacttcaagcccttcaagtacaacgacctgggcgccctggcctacctgggcagcgaaagagccattgccaccatcagaagcggcaagcggaccttctacaccggcggaggcctgatgaccttctacctgtggcggatcatctacatgagcatgatcctgagcgcccgcagcagactgaaggtgttcttcgactggatcaagctggccttcttcaagagggacttcttcaagggcctgtga

SEQ ID NO: 788 - DNA, 1542 bp, Artificial Sequence
  source: /note="Description of Artificial Sequence: Synthetic polynucleotide"
atgctgagcaagaacctgtacagcaacaagcggctgctgaccagcaccaacaccctcgtgcgcttcgccagcaccagatccaccggcgtcgaaaacagcggggctggccccaccagcttcaagaccatgaagatcatcgacccccagcacagcgacaagcccaacgtgctgatcctgggctctggctggggcgccatcagctttctgaagcacatcgacaccaagaagtacaacgtcagcatcatcagccccagaagctacttcctgtacacccccctgctgcccagcgcccctgtgggaaccgtggacgagaagtccatcatcgagcccatcgtgaacttcgccctgaagaaaaagggcaacgtcacctactacgaggccgaggccaccagcatcaaccccgaccggaacaccgtgaccatcaagagcctgagcgccgtgtcccagctgtaccagcccgagaaccacctgggcctgcaccaggccgagcccgccgagattaagtacgactacctgatcagcgccgtgggcgccgagcccaacacctttggaatccccggcgtgaccgactacggccacttcctgaaagagatccccaacagcctggaaatccggcggaccttcgccgccaacctggaaaaggccaacctgctgcctaagggcgaccccgagcggagaaggctgctgagcatcgtggtcgtgggcggaggccccacaggcgtggaagctgctggcgagctgcaggactacgtgcaccaggacctgcggaagttcctgcccgccctggccgaggaaatccagattcacctggtggaagccctgcccatcgtgctgaacatgttcgagaagaagctgagcagctacgcccagagccacctggaaaacacctccatcaaggtgcacctgagaaccgccgtggccaaggtggaagagaagcagctgctggccaagaccaagcacgaggacggcaagattaccgaggaaaccatcccctacggcaccctgatttgggccaccggcaacaaggccagacccgtgatcaccgacctgttcaagaagatccccgagcagaacagcagcaagcggggcctggccgtgaacgacttcctgcaggtcaaaggcagcaacaacatcttcgccatcggcgacaacgcctttgccggcctgcctcctacagcccaggtggcccaccaggaagccgagtacctggccaagaacttcgacaagatggcccagatccccaatttccagaagaacctgtcctcccggaaggataagatcgacctgctgttcgaggaaaacaacttcaagcccttcaagtacaacgacctgggcgccctggcctacctgggcagcgaaagagccattgccaccatcagaagcggcaagcggaccttctacaccggcggaggcctgatgaccttctacctgtggcggatcctgtacatgagcatgatcctgagcgcccgcagcagactgaaggtgttcttcgactggatcaagctggccttcttcaagagggacttcttcaagggcctgtga

SEQ ID NO: 789 - DNA, 1542 bp, Artificial Sequence
  source: /note="Description of Artificial Sequence: Synthetic polynucleotide"
atgctgagcaagaacctgtacagcaacaagcggctgctgaccagcaccaacaccctcgtgcgcttcgccagcaccagatccaccggcgtcgaaaacagcggggctggccccaccagcttcaagaccatgaagatcatcgacccccagcacagcgacaagcccaacgtgctgatcctgggctctggctggggcgccatcagctttctgaagcacatcgacaccaagaagtacaacgtcagcatcatcagccccagaagctacttcctgtacacccccctgctgcccagcgcccctgtgggaaccgtggacgagaagtccatcatcgagcccatcgtgaacttcgccctgaagaaaaagggcaacgtcacctactacgaggccgaggccaccagcatcaaccccgaccggaacaccgtgaccatcaagagcctgagcgccgtgtcccagctgtaccagcccgagaaccacctgggcctgcaccaggccgagcccgccgagattaagtacgactacctgatcagcgccgtgggcgccgagcccaacacctttggaatccccggcgtgaccgactacggccacttcctgaaagagatccccaacagcctggaaatccggcggaccttcgccgccaacctggaaaaggccaacctgctgcctaagggcgaccccgagcggagaaggctgctgagcatcgtggtcgtgggcggaggccccacaggcgtggaagctgctggcgagctgcaggactacgtgcaccaggacctgcggaagttcctgcccgccctggccgaggaaatccagattcacctggtggaagccctgcccatcgtgctgaacatgttcgagaagaagctgagcagctacgcccagagccacctggaaaacacctccatcaaggtgcacctgagaaccgccgtggccaaggtggaagagaagcagctgctggccaagaccaagcacgaggacggcaagattaccgaggaaaccatcccctacggcaccctgatttgggccaccggcaacaaggccagacccgtgatcaccgacctgttcaagaagatccccgagcagaacagcagcaagcggggcctggccgtgaacgacttcctgcaggtcaaaggcagcaacaacatcttcgccatcggcgacaacgcctttgccggcctgcctcctacagcccaggtggcccaccaggaagccgagtacctggccaagaacttcgacaagatggcccagatccccaatttccagaagaacctgtcctcccggaaggataagatcgacctgctgttcgaggaaaacaacttcaagcccttcaagtacaacgacctgggcgccctggcctacctgggcagcgaaagagccattgccaccatcagaagcggcaagcggaccttctacaccggcggaggcctgatgaccttctacctgtggcggatcatctacctgagcatgatcctgagcgcccgcagcagactgaaggtgttcttcgactggatcaagctggccttcttcaagagggacttcttcaagggcctgtga

SEQ ID NO: 790 - DNA, 1542 bp, Artificial Sequence
  source: /note="Description of Artificial Sequence: Synthetic polynucleotide"
atgctgagcaagaacctgtacagcaacaagcggctgctgaccagcaccaacaccctcgtgcgcttcgccagcaccagatccaccggcgtcgaaaacagcggggctggccccaccagcttcaagaccatgaagatcatcgacccccagcacagcgacaagcccaacgtgctgatcctgggctctggctggggcgccatcagctttctgaagcacatcgacaccaagaagtacaacgtcagcatcatcagccccagaagctacttcctgtacacccccctgctgcccagcgcccctgtgggaaccgtggacgagaagtccatcatcgagcccatcgtgaacttcgccctgaagaaaaagggcaacgtcacctactacgaggccgaggccaccagcatcaaccccgaccggaacaccgtgaccatcaagagcctgagcgccgtgtcccagctgtaccagcccgagaaccacctgggcctgcaccaggccgagcccgccgagattaagtacgactacctgatcagcgccgtgggcgccgagcccaacacctttggaatccccggcgtgaccgactacggccacttcctgaaagagatccccaacagcctggaaatccggcggaccttcgccgccaacctggaaaaggccaacctgctgcctaagggcgaccccgagcggagaaggctgctgagcatcgtggtcgtgggcggaggccccacaggcgtggaagctgctggcgagctgcaggactacgtgcaccaggacctgcggaagttcctgcccgccctggccgaggaagtgcagattcacctggtggaagccctgcccatcgtgctgaacatgttcgagaagaagctgagcagctacgcccagagccacctggaaaacacctccatcaaggtgcacctgagaaccgccgtggccaaggtggaagagaagcagctgctggccaagaccaagcacgaggacggcaagattaccgaggaaaccatcccctacggcaccctgatttgggccaccggcaacaaggccagacccgtgatcaccgacctgttcaagaagatccccgagcagaacagcagcaagcggggcctggccgtgaacgacttcctgcaggtcaaaggcagcaacaacatcttcgccatcggcgacaacgcctttgccggcctgcctcctacagcccaggtggcccaccaggaagccgagtacctggccaagaacttcgacaagatggcccagatccccaatttccagaagaacctgtcctcccggaaggataagatcgacctgctgttcgaggaaaacaacttcaagcccttcaagtacaacgacctgggcgccctggcctacctgggcagcgaaagagccattgccaccatcagaagcggcaagcggaccttctacaccggcggaggcctgatgaccttctacctgtggcggatcatctacatgagcatgatcctgagcgcccgcagcagactgaaggtgttcttcgactggatcaagctggccttcttcaagagggacttcttcaagggcctgtga

SEQ ID NO: 791 - DNA, 1542 bp, Artificial Sequence
  source: /note="Description of Artificial Sequence: Synthetic polynucleotide"
atgctgagcaagaacctgtacagcaacaagcggctgctgaccagcaccaacaccctcgtgcgcttcgccagcaccagatccaccggcgtcgaaaacagcggggctggccccaccagcttcaagaccatgaaggtcatcgacccccagcacagcgacaagcccaacgtgctgatcctgggctctggctggggcgccatcagctttctgaagcacatcgacaccaagaagtacaacgtcagcatcatcagccccagaagctacttcatcttcacccccctgctgcccagcgcccctgtgggaaccgtggacgagaagtccatcatcgagcccatcgtgaacttcgccctgaagaaaaagggcaacgtcacctactacgaggccgaggccaccagcatcaaccccgaccggaacaccgtgaccatcaagagcctgagcgccgtgtcccagctgtaccagcccgagaaccacctgggcctgcaccaggccgagcccgccgagattaagtacgactacctgatcagcgccgtgggcgccgagcccaacacctttggaatccccggcgtgaccgactacggccacttcctgaaagagatccccaacagcctggaaatccggcggaccttcgccgccaacctggaaaaggccaacctgctgcctaagggcgaccccgagcggagaaggctgctgagcatcgtggtcgtgggcggaggccccacaggcgtggaagctgctggcgagctgcaggactacgtgcaccaggacctgcggaagttcctgcccgccctggccgaggaaatccagattcacctggtggaagccctgcccatcgtgctgaacatgttcgagaagaagctgagcagctacgcccagagccacctggaaaacacctccatcaaggtgcacctgagaaccgccgtggccaaggtggaagagaagcagctgctggccaagaccaagcacgaggacggcaagattaccgaggaaaccatcccctacggcaccctgatttgggccaccggcaacaaggccagacccgtgatcaccgacctgttcaagaagatccccgagcagaacagcagcaagcggggcctggccgtgaacgacttcctgcaggtcaaaggcagcaacaacatcttcgccatcggcgacaacgcctttgccggcctgcctcctacagcccaggtggcccaccaggaagccgagtacctggccaagaacttcgacaagatggcccagatccccaatttccagaagaacctgtcctcccggaaggataagatcgacctgctgttcgaggaaaacaacttcaagcccttcaagtacaacgacctgggcgccctggcctacctgggcagcgaaagagccattgccaccatcagaagcggcaagcggaccttctacaccggcggaggcctgatgaccttctacctgtggcggatcatctacatgagcatgatcctgagcgcccgcagcagactgaaggtgttcttcgactggatcaagctggccttcttcaagagggacttcttcaagggcctgtga

SEQ ID NO: 792 - DNA, 1542 bp, Artificial Sequence
  source: /note="Description of Artificial Sequence: Synthetic polynucleotide"
atgctgagcaagaacctgtacagcaacaagcggctgctgaccagcaccaacaccctcgtgcgcttcgccagcaccagatccaccggcgtcgaaaacagcggggctggccccaccagcttcaagaccatgaagatcatcgacccccagcacagcgacaagcccaacgtgctgatcctgggctctggctggggcgccatcagctttctgaagcacatcgacaccaagaagtacaacgtcagcatcatcagccccagaagctacttcatcttcacccccctgctgcccagcgcccctgtgggaaccgtggacgagaagtccatcatcgagcccatcgtgaacttcgccctgaagaaaaagggcaacgtcacctactacgaggccgaggccaccagcatcaaccccgaccggaacaccgtgaccatcaagagcctgagcgccgtgtcccagctgtaccagcccgagaaccacctgggcctgcaccaggccgagcccgccgagattaagtacgactacctgatcagcgccgtgggcgccgagcccaacacctttggaatccccggcgtgaccgactacggccacttcctgaaagagatccccaacagcctggaaatccggcggaccttcgccgccaacctggaaaaggccaacctgctgcctaagggcgaccccgagcggagaaggctgctgagcatcgtggtcgtgggcggaggccccacaggcgtggaagctgctggcgagctgcaggactacgtgcaccaggacctgcggaagttcctgcccgccctggccgaggaaatccagattcacctggtggaagccctgcccatcgtgctgaacatgttcgagaagaagctgagcagctacgcccagagccacctggaaaacacctccatcaaggtgcacctgagaaccgccgtggccaaggtggaagagaagcagctgctggccaagaccaagcacgaggacggcaagattaccgaggaaaccatcccctacggcaccctgatttgggccaccggcaacaaggccagacccgtgatcaccgacctgttcaagaagatccccgagcagaacagcagcaagcggggcctggccgtgaacgacttcctgcaggtcaaaggcagcaacaacatcttcgccatcggcgacaacgcctttgccggcctgcctcctacagcccaggtggcccaccaggaagccgagtacctggccaagaacttcgacaagatggcccagatccccaatttccagaagaacctgtcctcccggaaggataagatcgacctgctgttcgaggaaaacaacttcaagcccttcaagtacaacgacctgggcgccctggcctacctgggcagcgaaagagccattgccaccatcagaagcggcaagcggaccttctacaccggcggaggcctgatgaccttctacctgtggcggatcctgtacatgagcatgatcctgagcgcccgcagcagactgaaggtgttcttcgactggatcaagctggccttcttcaagagggacttcttcaagggcctgtga

SEQ ID NO: 793 - DNA, 1542 bp, Artificial Sequence
  source: /note="Description of Artificial Sequence: Synthetic polynucleotide"
atgctgagcaagaacctgtacagcaacaagcggctgctgaccagcaccaacaccctcgtgcgcttcgccagcaccagatccaccggcgtcgaaaacagcggggctggccccaccagcttcaagaccatgaagatcatcgacccccagcacagcgacaagcccaacgtgctgatcctgggctctggctggggcgccatcagctttctgaagcacatcgacaccaagaagtacaacgtcagcatcatcagccccagaagctacttcatcttcacccccctgctgcccagcgcccctgtgggaaccgtggacgagaagtccatcatcgagcccatcgtgaacttcgccctgaagaaaaagggcaacgtcacctactacgaggccgaggccaccagcatcaaccccgaccggaacaccgtgaccatcaagagcctgagcgccgtgtcccagctgtaccagcccgagaaccacctgggcctgcaccaggccgagcccgccgagattaagtacgactacctgatcagcgccgtgggcgccgagcccaacacctttggaatccccggcgtgaccgactacggccacttcctgaaagagatccccaacagcctggaaatccggcggaccttcgccgccaacctggaaaaggccaacctgctgcctaagggcgaccccgagcggagaaggctgctgagcatcgtggtcgtgggcggaggccccacaggcgtggaagctgctggcgagctgcaggactacgtgcaccaggacctgcggaagttcctgcccgccctggccgaggaaatccagattcacctggtggaagccctgcccatcgtgctgaacatgttcgagaagaagctgagcagctacgcccagagccacctggaaaacacctccatcaaggtgcacctgagaaccgccgtggccaaggtggaagagaagcagctgctggccaagaccaagcacgaggacggcaagattaccgaggaaaccatcccctacggcaccctgatttgggccaccggcaacaaggccagacccgtgatcaccgacctgttcaagaagatccccgagcagaacagcagcaagcggggcctggccgtgaacgacttcctgcaggtcaaaggcagcaacaacatcttcgccatcggcgacaacgcctttgccggcctgcctcctacagcccaggtggcccaccaggaagccgagtacctggccaagaacttcgacaagatggcccagatccccaatttccagaagaacctgtcctcccggaaggataagatcgacctgctgttcgaggaaaacaacttcaagcccttcaagtacaacgacctgggcgccctggcctacctgggcagcgaaagagccattgccaccatcagaagcggcaagcggaccttctacaccggcggaggcctgatgaccttctacctgtggcggatcatctacctgagcatgatcctgagcgcccgcagcagactgaaggtgttcttcgactggatcaagctggccttcttcaagagggacttcttcaagggcctgtga

SEQ ID NO: 794 - DNA, 1542 bp, Artificial Sequence
  source: /note="Description of Artificial Sequence: Synthetic polynucleotide"
atgctgagcaagaacctgtacagcaacaagcggctgctgaccagcaccaacaccctcgtgcgcttcgccagcaccagatccaccggcgtcgaaaacagcggggctggccccaccagcttcaagaccatgaagatcatcgacccccagcacagcgacaagcccaacgtgctgatcctgggctctggctggggcgccatcagctttctgaagcacatcgacaccaagaagtacaacgtcagcatcatcagccccagaagctacttcatcttcacccccctgctgcccagcgcccctgtgggaaccgtggacgagaagtccatcatcgagcccatcgtgaacttcgccctgaagaaaaagggcaacgtcacctactacgaggccgaggccaccagcatcaaccccgaccggaacaccgtgaccatcaagagcctgagcgccgtgtcccagctgtaccagcccgagaaccacctgggcctgcaccaggccgagcccgccgagattaagtacgactacctgatcagcgccgtgggcgccgagcccaacacctttggaatccccggcgtgaccgactacggccacttcctgaaagagatccccaacagcctggaaatccggcggaccttcgccgccaacctggaaaaggccaacctgctgcctaagggcgaccccgagcggagaaggctgctgagcatcgtggtcgtgggcggaggccccacaggcgtggaagctgctggcgagctgcaggactacgtgcaccaggacctgcggaagttcctgcccgccctggccgaggaagtgcagattcacctggtggaagccctgcccatcgtgctgaacatgttcgagaagaagctgagcagctacgcccagagccacctggaaaacacctccatcaaggtgcacctgagaaccgccgtggccaaggtggaagagaagcagctgctggccaagaccaagcacgaggacggcaagattaccgaggaaaccatcccctacggcaccctgatttgggccaccggcaacaaggccagacccgtgatcaccgacctgttcaagaagatccccgagcagaacagcagcaagcggggcctggccgtgaacgacttcctgcaggtcaaaggcagcaacaacatcttcgccatcggcgacaacgcctttgccggcctgcctcctacagcccaggtggcccaccaggaagccgagtacctggccaagaacttcgacaagatggcccagatccccaatttccagaagaacctgtcctcccggaaggataagatcgacctgctgttcgaggaaaacaacttcaagcccttcaagtacaacgacctgggcgccctggcctacctgggcagcgaaagagccattgccaccatcagaagcggcaagcggaccttctacaccggcggaggcctgatgaccttctacctgtggcggatcatctacatgagcatgatcctgagcgcccgcagcagactgaaggtgttcttcgactggatcaagctggccttcttcaagagggacttcttcaagggcctgtga

SEQ ID NO: 795 - DNA, 1542 bp, Artificial Sequence
  source: /note="Description of Artificial Sequence: Synthetic polynucleotide"
atgctgagcaagaacctgtacagcaacaagcggctgctgaccagcaccaacaccctcgtgcgcttcgccagcaccagatccaccggcgtcgaaaacagcggggctggccccaccagcttcaagaccatgaagatcatcgacccccagcacagcgacaagcccaacgtgctgatcctgggctctggctggggcgccatcagctttctgaagcacatcgacaccaagaagtacaacgtcagcatcatcagccccagaagctacttcctgttcacccccctgctgcccagcgcccctgtgggaaccgtggacgagaagtccatcatcgagcccatcgtgaacttcgccctgaagaaaaagggcaacgtcacctactacgaggccgaggccaccagcatcaaccccgaccggaacaccgtgaccatcaagagcctgagcgccgtgtcccagctgtaccagcccgagaaccacctgggcctgcaccaggccgagcccgccgagattaagtacgactacctgatcagcgccgtgggcgccgagcccaacacctttggaatccccggcgtgaccgactacggccacttcctgaaagagatccccaacagcctggaaatccggcggaccttcgccgccaacctggaaaaggccaacctgctgcctaagggcgaccccgagcggagaaggctgctgagcatcgtggtcgtgggcggaggccccacaggcgtggaagctgctggcgagctgcaggactacgtgcaccaggacctgcggaagttcctgcccgccctggccgaggaaatccagattcacctggtggaagccctgcccatcgtgctgaacatgttcgagaagaagctgagcagctacgcccagagccacctggaaaacacctccatcaaggtgcacctgagaaccgccgtggccaaggtggaagagaagcagctgctggccaagaccaagcacgaggacggcaagattaccgaggaaaccatcccctacggcaccctgatttgggccaccggcaacaaggccagacccgtgatcaccgacctgttcaagaagatccccgagcagaacagcagcaagcggggcctggccgtgaacgacttcctgcaggtcaaaggcagcaacaacatcttcgccatcggcgacaacgcctttgccggcctgcctcctacagcccaggtggcccaccaggaagccgagtacctggccaagaacttcgacaagatggcccagatccccaatttccagaagaacctgtcctcccggaaggataagatcgacctgctgttcgaggaaaacaacttcaagcccttcaagtacaacgacctgggcgccctggcctacctgggcagcgaaagagccattgccaccatcagaagcggcaagcggaccttctacaccggcggaggcctgatgaccttctacctgtggcggatcatctacatgagcatgatcctgagcgcccgcagcagactgaaggtgttcttcgactggatcaagctggccttcttcaagagggacttcttcaagggcctgtga

SEQ ID NO: 796 - DNA, 1542 bp, Artificial Sequence
  source: /note="Description of Artificial Sequence: Synthetic polynucleotide"
atgctgagcaagaacctgtacagcaacaagcggctgctgaccagcaccaacaccctcgtgcgcttcgccagcaccagatccaccggcgtcgaaaacagcggggctggccccaccagcttcaagaccatgaaggtcatcgacccccagcacagcgacaagcccaacgtgctgatcctgggctctggctggggcgccatcagctttctgaagcacatcgacaccaagaagtacaacgtcagcatcgtgagccccagaagctacttcatctacacccccctgctgcccagcgcccctgtgggaaccgtggacgagaagtccatcatcgagcccatcgtgaacttcgccctgaagaaaaagggcaacgtcacctactacgaggccgaggccaccagcatcaaccccgaccggaacaccgtgaccatcaagagcctgagcgccgtgtcccagctgtaccagcccgagaaccacctgggcctgcaccaggccgagcccgccgagattaagtacgactacctgatcagcgccgtgggcgccgagcccaacacctttggaatccccggcgtgaccgactacggccacttcctgaaagagatccccaacagcctggaaatccggcggaccttcgccgccaacctggaaaaggccaacctgctgcctaagggcgaccccgagcggagaaggctgctgagcatcgtggtcgtgggcggaggccccacaggcgtggaagctgctggcgagctgcaggactacgtgcaccaggacctgcggaagttcctgcccgccctggccgaggaaatccagattcacctggtggaagccctgcccatcgtgctgaacatgttcgagaagaagctgagcagctacgcccagagccacctggaaaacacctccatcaaggtgcacctgagaaccgccgtggccaaggtggaagagaagcagctgctggccaagaccaagcacgaggacggcaagattaccgaggaaaccatcccctacggcaccctgatttgggccaccggcaacaaggccagacccgtgatcaccgacctgttcaagaagatccccgagcagaacagcagcaagcggggcctggccgtgaacgacttcctgcaggtcaaaggcagcaacaacatcttcgccatcggcgacaacgcctttgccggcctgcctcctacagcccaggtggcccaccaggaagccgagtacctggccaagaacttcgacaagatggcccagatccccaatttccagaagaacctgtcctcccggaaggataagatcgacctgctgttcgaggaaaacaacttcaagcccttcaagtacaacgacctgggcgccctggcctacctgggcagcgaaagagccattgccaccatcagaagcggcaagcggaccttctacaccggcggaggcctgatgaccttctacctgtggcggatcctgtacatgagcatgatcctgagcgcccgcagcagactgaaggtgttcttcgactggatcaagctggccttcttcaagagggacttcttcaagggcctgtga

SEQ ID NO: 797 - DNA, 1542 bp, Artificial Sequence
  source: /note="Description of Artificial Sequence: Synthetic polynucleotide"
atgctgagcaagaacctgtacagcaacaagcggctgctgaccagcaccaacaccctcgtgcgcttcgccagcaccagatccaccggcgtcgaaaacagcggggctggccccaccagcttcaagaccatgaaggtcatcgacccccagcacagcgacaagcccaacgtgctgatcctgggctctggctggggcgccatcagctttctgaagcacatcgacaccaagaagtacaacgtcagcatcgtgagccccagaagctacttcatctacacccccctgctgcccagcgcccctgtgggaaccgtggacgagaagtccatcatcgagcccatcgtgaacttcgccctgaagaaaaagggcaacgtcacctactacgaggccgaggccaccagcatcaaccccgaccggaacaccgtgaccatcaagagcctgagcgccgtgtcccagctgtaccagcccgagaaccacctgggcctgcaccaggccgagcccgccgagattaagtacgactacctgatcagcgccgtgggcgccgagcccaacacctttggaatccccggcgtgaccgactacggccacttcctgaaagagatccccaacagcctggaaatccggcggaccttcgccgccaacctggaaaaggccaacctgctgcctaagggcgaccccgagcggagaaggctgctgagcatcgtggtcgtgggcggaggccccacaggcgtggaagctgctggcgagctgcaggactacgtgcaccaggacctgcggaagttcctgcccgccctggccgaggaaatccagattcacctggtggaagccctgcccatcgtgctgaacatgttcgagaagaagctgagcagctacgcccagagccacctggaaaacacctccatcaaggtgcacctgagaaccgccgtggccaaggtggaagagaagcagctgctggccaagaccaagcacgaggacggcaagattaccgaggaaaccatcccctacggcaccctgatttgggccaccggcaacaaggccagacccgtgatcaccgacctgttcaagaagatccccgagcagaacagcagcaagcggggcctggccgtgaacgacttcctgcaggtcaaaggcagcaacaacatcttcgccatcggcgacaacgcctttgccggcctgcctcctacagcccaggtggcccaccaggaagccgagtacctggccaagaacttcgacaagatggcccagatccccaatttccagaagaacctgtcctcccggaaggataagatcgacctgctgttcgaggaaaacaacttcaagcccttcaagtacaacgacctgggcgccctggcctacctgggcagcgaaagagccattgccaccatcagaagcggcaagcggaccttctacaccggcggaggcctgatgaccttctacctgtggcggatcatctacctgagcatgatcctgagcgcccgcagcagactgaaggtgttcttcgactggatcaagctggccttcttcaagagggacttcttcaagggcctgtga

SEQ ID NO: 798 - DNA, 1542 bp, Artificial Sequence
  source: /note="Description of Artificial Sequence: Synthetic polynucleotide"
atgctgagcaagaacctgtacagcaacaagcggctgctgaccagcaccaacaccctcgtgcgcttcgccagcaccagatccaccggcgtcgaaaacagcggggctggccccaccagcttcaagaccatgaagatcatcgacccccagcacagcgacaagcccaacgtgctgatcctgggctctggctggggcgccatcagctttctgaagcacatcgacaccaagaagtacaacgtcagcatcgtgagccccagaagctacttcatctacacccccctgctgcccagcgcccctgtgggaaccgtggacgagaagtccatcatcgagcccatcgtgaacttcgccctgaagaaaaagggcaacgtcacctactacgaggccgaggccaccagcatcaaccccgaccggaacaccgtgaccatcaagagcctgagcgccgtgtcccagctgtaccagcccgagaaccacctgggcctgcaccaggccgagcccgccgagattaagtacgactacctgatcagcgccgtgggcgccgagcccaacacctttggaatccccggcgtgaccgactacggccacttcctgaaagagatccccaacagcctggaaatccggcggaccttcgccgccaacctggaaaaggccaacctgctgcctaagggcgaccccgagcggagaaggctgctgagcatcgtggtcgtgggcggaggccccacaggcgtggaagctgctggcgagctgcaggactacgtgcaccaggacctgcggaagttcctgcccgccctggccgaggaaatccagattcacctggtggaagccctgcccatcgtgctgaacatgttcgagaagaagctgagcagctacgcccagagccacctggaaaacacctccatcaaggtgcacctgagaaccgccgtggccaaggtggaagagaagcagctgctggccaagaccaagcacgaggacggcaagattaccgaggaaaccatcccctacggcaccctgatttgggccaccggcaacaaggccagacccgtgatcaccgacctgttcaagaagatccccgagcagaacagcagcaagcggggcctggccgtgaacgacttcctgcaggtcaaaggcagcaacaacatcttcgccatcggcgacaacgcctttgccggcctgcctcctacagcccaggtggcccaccaggaagccgagtacctggccaagaacttcgacaagatggcccagatccccaatttccagaagaacctgtcctcccggaaggataagatcgacctgctgttcgaggaaaacaacttcaagcccttcaagtacaacgacctgggcgccctggcctacctgggcagcgaaagagccattgccaccatcagaagcggcaagcggaccttctacaccggcggaggcctgatgaccttctacctgtggcggatcctgtacctgagcatgatcctgagcgcccgcagcagactgaaggtgttcttcgactggatcaagctggccttcttcaagagggacttcttcaagggcctgtga

SEQ ID NO: 799 - DNA, 1542 bp, Artificial Sequence
  source: /note="Description of Artificial Sequence: Synthetic polynucleotide"
atgctgagcaagaacctgtacagcaacaagcggctgctgaccagcaccaacaccctcgtgcgcttcgccagcaccagatccaccggcgtcgaaaacagcggggctggccccaccagcttcaagaccatgaaggtcatcgacccccagcacagcgacaagcccaacgtgctgatcctgggctctggctggggcgccatcagctttctgaagcacatcgacaccaagaagtacaacgtcagcatcgtgagccccagaagctacttcatctacacccccctgctgcccagcgcccctgtgggaaccgtggacgagaagtccatcatcgagcccatcgtgaacttcgccctgaagaaaaagggcaacgtcacctactacgaggccgaggccaccagcatcaaccccgaccggaacaccgtgaccatcaagagcctgagcgccgtgtcccagctgtaccagcccgagaaccacctgggcctgcaccaggccgagcccgccgagattaagtacgactacctgatcagcgccgtgggcgccgagcccaacacctttggaatccccggcgtgaccgactacggccacttcctgaaagagatccccaacagcctggaaatccggcggaccttcgccgccaacctggaaaaggccaacctgctgcctaagggcgaccccgagcggagaaggctgctgagcatcgtggtcgtgggcggaggccccacaggcgtggaagctgctggcgagctgcaggactacgtgcaccaggacctgcggaagttcctgcccgccctggccgaggaagtgcagattcacctggtggaagccctgcccatcgtgctgaacatgttcgagaagaagctgagcagctacgcccagagccacctggaaaacacctccatcaaggtgcacctgagaaccgccgtggccaaggtggaagagaagcagctgctggccaagaccaagcacgaggacggcaagattaccgaggaaaccatcccctacggcaccctgatttgggccaccggcaacaaggccagacccgtgatcaccgacctgttcaagaagatccccgagcagaacagcagcaagcggggcctggccgtgaacgacttcctgcaggtcaaaggcagcaacaacatcttcgccatcggcgacaacgcctttgccggcctgcctcctacagcccaggtggcccaccaggaagccgagtacctggccaagaacttcgacaagatggcccagatccccaatttccagaagaacctgtcctcccggaaggataagatcgacctgctgttcgaggaaaacaacttcaagcccttcaagtacaacgacctgggcgccctggcctacctgggcagcgaaagagccattgccaccatcagaagcggcaagcggaccttctacaccggcggaggcctgatgaccttctacctgtggcggatcatctacatgagcatgatcctgagcgcccgcagcagactgaaggtgttcttcgactggatcaagctggccttcttcaagagggacttcttcaagggcctgtga

SEQ ID NO: 800 - DNA, 1542 bp, Artificial Sequence
  source: /note="Description of Artificial Sequence: Synthetic polynucleotide"
atgctgagcaagaacctgtacagcaacaagcggctgctgaccagcaccaacaccctcgtgcgcttcgccagcaccagatccaccggcgtcgaaaacagcggggctggccccaccagcttcaagaccatgaagatcatcgacccccagcacagcgacaagcccaacgtgctgatcctgggctctggctggggcgccatcagctttctgaagcacatcgacaccaagaagtacaacgtcagcatcgtgagccccagaagctacttcatctacacccccctgctgcccagcgcccctgtgggaaccgtggacgagaagtccatcatcgagcccatcgtgaacttcgccctgaagaaaaagggcaacgtcacctactacgaggccgaggccaccagcatcaaccccgaccggaacaccgtgaccatcaagagcctgagcgccgtgtcccagctgtaccagcccgagaaccacctgggcctgcaccaggccgagcccgccgagattaagtacgactacctgatcagcgccgtgggcgccgagcccaacacctttggaatccccggcgtgaccgactacggccacttcctgaaagagatccccaacagcctggaaatccggcggaccttcgccgccaacctggaaaaggccaacctgctgcctaagggcgaccccgagcggagaaggctgctgagcatcgtggtcgtgggcggaggccccacaggcgtggaagctgctggcgagctgcaggactacgtgcaccaggacctgcggaagttcctgcccgccctggccgaggaagtgcagattcacctggtggaagccctgcccatcgtgctgaacatgttcgagaagaagctgagcagctacgcccagagccacctggaaaacacctccatcaaggtgcacctgagaaccgccgtggccaaggtggaagagaagcagctgctggccaagaccaagcacgaggacggcaagattaccgaggaaaccatcccctacggcaccctgatttgggccaccggcaacaaggccagacccgtgatcaccgacctgttcaagaagatccccgagcagaacagcagcaagcggggcctggccgtgaacgacttcctgcaggtcaaaggcagcaacaacatcttcgccatcggcgacaacgcctttgccggcctgcctcctacagcccaggtggcccaccaggaagccgagtacctggccaagaacttcgacaagatggcccagatccccaatttccagaagaacctgtcctcccggaaggataagatcgacctgctgttcgaggaaaacaacttcaagcccttcaagtacaacgacctgggcgccctggcctacctgggcagcgaaagagccattgccaccatcagaagcggcaagcggaccttctacaccggcggaggcctgatgaccttctacctgtggcggatcctgtacatgagcatgatcctgagcgcccgcagcagactgaaggtgttcttcgactggatcaagctggccttcttcaagagggacttcttcaagggcctgtga

SEQ ID NO: 801 - DNA, 1542 bp, Artificial Sequence
  source: /note="Description of Artificial Sequence: Synthetic polynucleotide"
atgctgagcaagaacctgtacagcaacaagcggctgctgaccagcaccaacaccctcgtgcgcttcgccagcaccagatccaccggcgtcgaaaacagcggggctggccccaccagcttcaagaccatgaagatcatcgacccccagcacagcgacaagcccaacgtgctgatcctgggctctggctggggcgccatcagctttctgaagcacatcgacaccaagaagtacaacgtcagcatcgtgagccccagaagctacttcatctacacccccctgctgcccagcgcccctgtgggaaccgtggacgagaagtccatcatcgagcccatcgtgaacttcgccctgaagaaaaagggcaacgtcacctactacgaggccgaggccaccagcatcaaccccgaccggaacaccgtgaccatcaagagcctgagcgccgtgtcccagctgtaccagcccgagaaccacctgggcctgcaccaggccgagcccgccgagattaagtacgactacctgatcagcgccgtgggcgccgagcccaacacctttggaatccccggcgtgaccgactacggccacttcctgaaagagatccccaacagcctggaaatccggcggaccttcgccgccaacctggaaaaggccaacctgctgcctaagggcgaccccgagcggagaaggctgctgagcatcgtggtcgtgggcggaggccccacaggcgtggaagctgctggcgagctgcaggactacgtgcaccaggacctgcggaagttcctgcccgccctggccgaggaagtgcagattcacctggtggaagccctgcccatcgtgctgaacatgttcgagaagaagctgagcagctacgcccagagccacctggaaaacacctccatcaaggtgcacctgagaaccgccgtggccaaggtggaagagaagcagctgctggccaagaccaagcacgaggacggcaagattaccgaggaaaccatcccctacggcaccctgatttgggccaccggcaacaaggccagacccgtgatcaccgacctgttcaagaagatccccgagcagaacagcagcaagcggggcctggccgtgaacgacttcctgcaggtcaaaggcagcaacaacatcttcgccatcggcgacaacgcctttgccggcctgcctcctacagcccaggtggcccaccaggaagccgagtacctggccaagaacttcgacaagatggcccagatccccaatttccagaagaacctgtcctcccggaaggataagatcgacctgctgttcgaggaaaacaacttcaagcccttcaagtacaacgacctgggcgccctggcctacctgggcagcgaaagagccattgccaccatcagaagcggcaagcggaccttctacaccggcggaggcctgatgaccttctacctgtggcggatcatctacctgagcatgatcctgagcgcccgcagcagactgaaggtgttcttcgactggatcaagctggccttcttcaagagggacttcttcaagggcctgtga

SEQ ID NO: 802 - DNA, 1542 bp, Artificial Sequence
  source: /note="Description of Artificial Sequence: Synthetic polynucleotide"
atgctgagcaagaacctgtacagcaacaagcggctgctgaccagcaccaacaccctcgtgcgcttcgccagcaccagatccaccggcgtcgaaaacagcggggctggccccaccagcttcaagaccatgaaggtcatcgacccccagcacagcgacaagcccaacgtgctgatcctgggctctggctggggcgccatcagctttctgaagcacatcgacaccaagaagtacaacgtcagcatcgtgagccccagaagctacttcctgtacacccccctgctgcccagcgcccctgtgggaaccgtggacgagaagtccatcatcgagcccatcgtgaacttcgccctgaagaaaaagggcaacgtcacctactacgaggccgaggccaccagcatcaaccccgaccggaacaccgtgaccatcaagagcctgagcgccgtgtcccagctgtaccagcccgagaaccacctgggcctgcaccaggccgagcccgccgagattaagtacgactacctgatcagcgccgtgggcgccgagcccaacacctttggaatccccggcgtgaccgactacggccacttcctgaaagagatccccaacagcctggaaatccggcggaccttcgccgccaacctggaaaaggccaacctgctgcctaagggcgaccccgagcggagaaggctgctgagcatcgtggtcgtgggcggaggccccacaggcgtggaagctgctggcgagctgcaggactacgtgcaccaggacctgcggaagttcctgcccgccctggccgaggaaatccagattcacctggtggaagccctgcccatcgtgctgaacatgttcgagaagaagctgagcagctacgcccagagccacctggaaaacacctccatcaaggtgcacctgagaaccgccgtggccaaggtggaagagaagcagctgctggccaagaccaagcacgaggacggcaagattaccgaggaaaccatcccctacggcaccctgatttgggccaccggcaacaaggccagacccgtgatcaccgacctgttcaagaagatccccgagcagaacagcagcaagcggggcctggccgtgaacgacttcctgcaggtcaaaggcagcaacaacatcttcgccatcggcgacaacgcctttgccggcctgcctcctacagcccaggtggcccaccaggaagccgagtacctggccaagaacttcgacaagatggcccagatccccaatttccagaagaacctgtcctcccggaaggataagatcgacctgctgttcgaggaaaacaacttcaagcccttcaagtacaacgacctgggcgccctggcctacctgggcagcgaaagagccattgccaccatcagaagcggcaagcggaccttctacaccggcggaggcctgatgaccttctacctgtggcggatcatctacatgagcatgatcctgagcgcccgcagcagactgaaggtgttcttcgactggatcaagctggccttcttcaagagggacttcttcaagggcctgtga

SEQ ID NO: 803 - DNA, 1542 bp, Artificial Sequence
  source: /note="Description of Artificial Sequence: Synthetic polynucleotide"
atgctgagcaagaacctgtacagcaacaagcggctgctgaccagcaccaacaccctcgtgcgcttcgccagcaccagatccaccggcgtcgaaaacagcggggctggccccaccagcttcaagaccatgaagatcatcgacccccagcacagcgacaagcccaacgtgctgatcctgggctctggctggggcgccatcagctttctgaagcacatcgacaccaagaagtacaacgtcagcatcgtgagccccagaagctacttcctgtacacccccctgctgcccagcgcccctgtgggaaccgtggacgagaagtccatcatcgagcccatcgtgaacttcgccctgaagaaaaagggcaacgtcacctactacgaggccgaggccaccagcatcaaccccgaccggaacaccgtgaccatcaagagcctgagcgccgtgtcccagctgtaccagcccgagaaccacctgggcctgcaccaggccgagcccgccgagattaagtacgactacctgatcagcgccgtgggcgccgagcccaacacctttggaatccccggcgtgaccgactacggccacttcctgaaagagatccccaacagcctggaaatccggcggaccttcgccgccaacctggaaaaggccaacctgctgcctaagggcgaccccgagcggagaaggctgctgagcatcgtggtcgtgggcggaggccccacaggcgtggaagctgctggcgagctgcaggactacgtgcaccaggacctgcggaagttcctgcccgccctggccgaggaaatccagattcacctggtggaagccctgcccatcgtgctgaacatgttcgagaagaagctgagcagctacgcccagagccacctggaaaacacctccatcaaggtgcacctgagaaccgccgtggccaaggtggaagagaagcagctgctggccaagaccaagcacgaggacggcaagattaccgaggaaaccatcccctacggcaccctgatttgggccaccggcaacaaggccagacccgtgatcaccgacctgttcaagaagatccccgagcagaacagcagcaagcggggcctggccgtgaacgacttcctgcaggtcaaaggcagcaacaacatcttcgccatcggcgacaacgcctttgccggcctgcctcctacagcccaggtggcccaccaggaagccgagtacctggccaagaacttcgacaagatggcccagatccccaatttccagaagaacctgtcctcccggaaggataagatcgacctgctgttcgaggaaaacaacttcaagcccttcaagtacaacgacctgggcgccctggcctacctgggcagcgaaagagccattgccaccatcagaagcggcaagcggaccttctacaccggcggaggcctgatgaccttctacctgtggcggatcctgtacatgagcatgatcctgagcgcccgcagcagactgaaggtgttcttcgactggatcaagctggccttcttcaagagggacttcttcaagggcctgtga

SEQ ID NO: 804 - DNA, 1542 bp, Artificial Sequence
  source: /note="Description of Artificial Sequence: Synthetic polynucleotide"
atgctgagcaagaacctgtacagcaacaagcggctgctgaccagcaccaacaccctcgtgcgcttcgccagcaccagatccaccggcgtcgaaaacagcggggctggccccaccagcttcaagaccatgaagatcatcgacccccagcacagcgacaagcccaacgtgctgatcctgggctctggctggggcgccatcagctttctgaagcacatcgacaccaagaagtacaacgtcagcatcgtgagccccagaagctacttcctgtacacccccctgctgcccagcgcccctgtgggaaccgtggacgagaagtccatcatcgagcccatcgtgaacttcgccctgaagaaaaagggcaacgtcacctactacgaggccgaggccaccagcatcaaccccgaccggaacaccgtgaccatcaagagcctgagcgccgtgtcccagctgtaccagcccgagaaccacctgggcctgcaccaggccgagcccgccgagattaagtacgactacctgatcagcgccgtgggcgccgagcccaacacctttggaatccccggcgtgaccgactacggccacttcctgaaagagatccccaacagcctggaaatccggcggaccttcgccgccaacctggaaaaggccaacctgctgcctaagggcgaccccgagcggagaaggctgctgagcatcgtggtcgtgggcggaggccccacaggcgtggaagctgctggcgagctgcaggactacgtgcaccaggacctgcggaagttcctgcccgccctggccgaggaaatccagattcacctggtggaagccctgcccatcgtgctgaacatgttcgagaagaagctgagcagctacgcccagagccacctggaaaacacctccatcaaggtgcacctgagaaccgccgtggccaaggtggaagagaagcagctgctggccaagaccaagcacgaggacggcaagattaccgaggaaaccatcccctacggcaccctgatttgggccaccggcaacaaggccagacccgtgatcaccgacctgttcaagaagatccccgagcagaacagcagcaagcggggcctggccgtgaacgacttcctgcaggtcaaaggcagcaacaacatcttcgccatcggcgacaacgcctttgccggcctgcctcctacagcccaggtggcccaccaggaagccgagtacctggccaagaacttcgacaagatggcccagatccccaatttccagaagaacctgtcctcccggaaggataagatcgacctgctgttcgaggaaaacaacttcaagcccttcaagtacaacgacctgggcgccctggcctacctgggcagcgaaagagccattgccaccatcagaagcggcaagcggaccttctacaccggcggaggcctgatgaccttctacctgtggcggatcatctacctgagcatgatcctgagcgcccgcagcagactgaaggtgttcttcgactggatcaagctggccttcttcaagagggacttcttcaagggcctgtga

SEQ ID NO: 805 - DNA, 1542 bp, Artificial Sequence
  source: /note="Description of Artificial Sequence: Synthetic polynucleotide"
atgctgagcaagaacctgtacagcaacaagcggctgctgaccagcaccaacaccctcgtgcgcttcgccagcaccagatccaccggcgtcgaaaacagcggggctggccccaccagcttcaagaccatgaagatcatcgacccccagcacagcgacaagcccaacgtgctgatcctgggctctggctggggcgccatcagctttctgaagcacatcgacaccaagaagtacaacgtcagcatcgtgagccccagaagctacttcctgtacacccccctgctgcccagcgcccctgtgggaaccgtggacgagaagtccatcatcgagcccatcgtgaacttcgccctgaagaaaaagggcaacgtcacctactacgaggccgaggccaccagcatcaaccccgaccggaacaccgtgaccatcaagagcctgagcgccgtgtcccagctgtaccagcccgagaaccacctgggcctgcaccaggccgagcccgccgagattaagtacgactacctgatcagcgccgtgggcgccgagcccaacacctttggaatccccggcgtgaccgactacggccacttcctgaaagagatccccaacagcctggaaatccggcggaccttcgccgccaacctggaaaaggccaacctgctgcctaagggcgaccccgagcggagaaggctgctgagcatcgtggtcgtgggcggaggccccacaggcgtggaagctgctggcgagctgcaggactacgtgcaccaggacctgcggaagttcctgcccgccctggccgaggaagtgcagattcacctggtggaagccctgcccatcgtgctgaacatgttcgagaagaagctgagcagctacgcccagagccacctggaaaacacctccatcaaggtgcacctgagaaccgccgtggccaaggtggaagagaagcagctgctggccaagaccaagcacgaggacggcaagattaccgaggaaaccatcccctacggcaccctgatttgggccaccggcaacaaggccagacccgtgatcaccgacctgttcaagaagatccccgagcagaacagcagcaagcggggcctggccgtgaacgacttcctgcaggtcaaaggcagcaacaacatcttcgccatcggcgacaacgcctttgccggcctgcctcctacagcccaggtggcccaccaggaagccgagtacctggccaagaacttcgacaagatggcccagatccccaatttccagaagaacctgtcctcccggaaggataagatcgacctgctgttcgaggaaaacaacttcaagcccttcaagtacaacgacctgggcgccctggcctacctgggcagcgaaagagccattgccaccatcagaagcggcaagcggaccttctacaccggcggaggcctgatgaccttctacctgtggcggatcatctacatgagcatgatcctgagcgcccgcagcagactgaaggtgttcttcgactggatcaagctggccttcttcaagagggacttcttcaagggcctgtga

SEQ ID NO: 806 - DNA, 1542 bp, Artificial Sequence
  source: /note="Description of Artificial Sequence: Synthetic polynucleotide"
atgctgagcaagaacctgtacagcaacaagcggctgctgaccagcaccaacaccctcgtgcgcttcgccagcaccagatccaccggcgtcgaaaacagcggggctggccccaccagcttcaagaccatgaaggtcatcgacccccagcacagcgacaagcccaacgtgctgatcctgggctctggctggggcgccatcagctttctgaagcacatcgacaccaagaagtacaacgtcagcatcgtgagccccagaagctacttcatcttcacccccctgctgcccagcgcccctgtgggaaccgtggacgagaagtccatcatcgagcccatcgtgaacttcgccctgaagaaaaagggcaacgtcacctactacgaggccgaggccaccagcatcaaccccgaccggaacaccgtgaccatcaagagcctgagcgccgtgtcccagctgtaccagcccgagaaccacctgggcctgcaccaggccgagcccgccgagattaagtacgactacctgatcagcgccgtgggcgccgagcccaacacctttggaatccccggcgtgaccgactacggccacttcctgaaagagatccccaacagcctggaaatccggcggaccttcgccgccaacctggaaaaggccaacctgctgcctaagggcgaccccgagcggagaaggctgctgagcatcgtggtcgtgggcggaggccccacaggcgtggaagctgctggcgagctgcaggactacgtgcaccaggacctgcggaagttcctgcccgccctggccgaggaaatccagattcacctggtggaagccctgcccatcgtgctgaacatgttcgagaagaagctgagcagctacgcccagagccacctggaaaacacctccatcaaggtgcacctgagaaccgccgtggccaaggtggaagagaagcagctgctggccaagaccaagcacgaggacggcaagattaccgaggaaaccatcccctacggcaccctgatttgggccaccggcaacaaggccagacccgtgatcaccgacctgttcaagaagatccccgagcagaacagcagcaagcggggcctggccgtgaacgacttcctgcaggtcaaaggcagcaacaacatcttcgccatcggcgacaacgcctttgccggcctgcctcctacagcccaggtggcccaccaggaagccgagtacctggccaagaacttcgacaagatggcccagatccccaatttccagaagaacctgtcctcccggaaggataagatcgacctgctgttcgaggaaaacaacttcaagcccttcaagtacaacgacctgggcgccctggcctacctgggcagcgaaagagccattgccaccatcagaagcggcaagcggaccttctacaccggcggaggcctgatgaccttctacctgtggcggatcatctacatgagcatgatcctgagcgcccgcagcagactgaaggtgttcttcgactggatcaagctggccttcttcaagagggacttcttcaagggcctgtga

SEQ ID NO: 807 - DNA, 1542 bp, Artificial Sequence
  source: /note="Description of Artificial Sequence: Synthetic polynucleotide"
atgctgagcaagaacctgtacagcaacaagcggctgctgaccagcaccaacaccctcgtgcgcttcgccagcaccagatccaccggcgtcgaaaacagcggggctggccccaccagcttcaagaccatgaagatcatcgacccccagcacagcgacaagcccaacgtgctgatcctgggctctggctggggcgccatcagctttctgaagcacatcgacaccaagaagtacaacgtcagcatcgtgagccccagaagctacttcatcttcacccccctgctgcccagcgcccctgtgggaaccgtggacgagaagtccatcatcgagcccatcgtgaacttcgccctgaagaaaaagggcaacgtcacctactacgaggccgaggccaccagcatcaaccccgaccggaacaccgtgaccatcaagagcctgagcgccgtgtcccagctgtaccagcccgagaaccacctgggcctgcaccaggccgagcccgccgagattaagtacgactacctgatcagcgccgtgggcgccgagcccaacacctttggaatccccggcgtgaccgactacggccacttcctgaaagagatccccaacagcctggaaatccggcggaccttcgccgccaacctggaaaaggccaacctgctgcctaagggcgaccccgagcggagaaggctgctgagcatcgtggtcgtgggcggaggccccacaggcgtggaagctgctggcgagctgcaggactacgtgcaccaggacctgcggaagttcctgcccgccctggccgaggaaatccagattcacctggtggaagccctgcccatcgtgctgaacatgttcgagaagaagctgagcagctacgcccagagccacctggaaaacacctccatcaaggtgcacctgagaaccgccgtggccaaggtggaagagaagcagctgctggccaagaccaagcacgaggacggcaagattaccgaggaaaccatcccctacggcaccctgatttgggccaccggcaacaaggccagacccgtgatcaccgacctgttcaagaagatccccgagcagaacagcagcaagcggggcctggccgtgaacgacttcctgcaggtcaaaggcagcaacaacatcttcgccatcggcgacaacgcctttgccggcctgcctcctacagcccaggtggcccaccaggaagccgagtacctggccaagaacttcgacaagatggcccagatccccaatttccagaagaacctgtcctcccggaaggataagatcgacctgctgttcgaggaaaacaacttcaagcccttcaagtacaacgacctgggcgccctggcctacctgggcagcgaaagagccattgccaccatcagaagcggcaagcggaccttctacaccggcggaggcctgatgaccttctacctgtggcggatcctgtacatgagcatgatcctgagcgcccgcagcagactgaaggtgttcttcgactggatcaagctggccttcttcaagagggacttcttcaagggcctgtga

SEQ ID NO: 808 - DNA, 1542 bp, Artificial Sequence
  source: /note="Description of Artificial Sequence: Synthetic polynucleotide"
atgctgagcaagaacctgtacagcaacaagcggctgctgaccagcaccaacaccctcgtgcgcttcgccagcaccagatccaccggcgtcgaaaacagcggggctggccccaccagcttcaagaccatgaagatcatcgacccccagcacagcgacaagcccaacgtgctgatcctgggctctggctggggcgccatcagctttctgaagcacatcgacaccaagaagtacaacgtcagcatcgtgagccccagaagctacttcatcttcacccccctgctgcccagcgcccctgtgggaaccgtggacgagaagtccatcatcgagcccatcgtgaacttcgccctgaagaaaaagggcaacgtcacctactacgaggccgaggccaccagcatcaaccccgaccggaacaccgtgaccatcaagagcctgagcgccgtgtcccagctgtaccagcccgagaaccacctgggcctgcaccaggccgagcccgccgagattaagtacgactacctgatcagcgccgtgggcgccgagcccaacacctttggaatccccggcgtgaccgactacggccacttcctgaaagagatccccaacagcctggaaatccggcggaccttcgccgccaacctggaaaaggccaacctgctgcctaagggcgaccccgagcggagaaggctgctgagcatcgtggtcgtgggcggaggccccacaggcgtggaagctgctggcgagctgcaggactacgtgcaccaggacctgcggaagttcctgcccgccctggccgaggaaatccagattcacctggtggaagccctgcccatcgtgctgaacatgttcgagaagaagctgagcagctacgcccagagccacctggaaaacacctccatcaaggtgcacctgagaaccgccgtggccaaggtggaagagaagcagctgctggccaagaccaagcacgaggacggcaagattaccgaggaaaccatcccctacggcaccctgatttgggccaccggcaacaaggccagacccgtgatcaccgacctgttcaagaagatccccgagcagaacagcagcaagcggggcctggccgtgaacgacttcctgcaggtcaaaggcagcaacaacatcttcgccatcggcgacaacgcctttgccggcctgcctcctacagcccaggtggcccaccaggaagccgagtacctggccaagaacttcgacaagatggcccagatccccaatttccagaagaacctgtcctcccggaaggataagatcgacctgctgttcgaggaaaacaacttcaagcccttcaagtacaacgacctgggcgccctggcctacctgggcagcgaaagagccattgccaccatcagaagcggcaagcggaccttctacaccggcggaggcctgatgaccttctacctgtggcggatcatctacctgagcatgatcctgagcgcccgcagcagactgaaggtgttcttcgactggatcaagctggccttcttcaagagggacttcttcaagggcctgtga

SEQ ID NO: 809 - DNA, 1542 bp, Artificial Sequence
  source: /note="Description of Artificial Sequence: Synthetic polynucleotide"
atgctgagcaagaacctgtacagcaacaagcggctgctgaccagcaccaacaccctcgtgcgcttcgccagcaccagatccaccggcgtcgaaaacagcggggctggccccaccagcttcaagaccatgaagatcatcgacccccagcacagcgacaagcccaacgtgctgatcctgggctctggctggggcgccatcagctttctgaagcacatcgacaccaagaagtacaacgtcagcatcgtgagccccagaagctacttcatcttcacccccctgctgcccagcgcccctgtgggaaccgtggacgagaagtccatcatcgagcccatcgtgaacttcgccctgaagaaaaagggcaacgtcacctactacgaggccgaggccaccagcatcaaccccgaccggaacaccgtgaccatcaagagcctgagcgccgtgtcccagctgtaccagcccgagaaccacctgggcctgcaccaggccgagcccgccgagattaagtacgactacctgatcagcgccgtgggcgccgagcccaacacctttggaatccccggcgtgaccgactacggccacttcctgaaagagatccccaacagcctggaaatccggcggaccttcgccgccaacctggaaaaggccaacctgctgcctaagggcgaccccgagcggagaaggctgctgagcatcgtggtcgtgggcggaggccccacaggcgtggaagctgctggcgagctgcaggactacgtgcaccaggacctgcggaagttcctgcccgccctggccgaggaagtgcagattcacctggtggaagccctgcccatcgtgctgaacatgttcgagaagaagctgagcagctacgcccagagccacctggaaaacacctccatcaaggtgcacctgagaaccgccgtggccaaggtggaagagaagcagctgctggccaagaccaagcacgaggacggcaagattaccgaggaaaccatcccctacggcaccctgatttgggccaccggcaacaaggccagacccgtgatcaccgacctgttcaagaagatccccgagcagaacagcagcaagcggggcctggccgtgaacgacttcctgcaggtcaaaggcagcaacaacatcttcgccatcggcgacaacgcctttgccggcctgcctcctacagcccaggtggcccaccaggaagccgagtacctggccaagaacttcgacaagatggcccagatccccaatttccagaagaacctgtcctcccggaaggataagatcgacctgctgttcgaggaaaacaacttcaagcccttcaagtacaacgacctgggcgccctggcctacctgggcagcgaaagagccattgccaccatcagaagcggcaagcggaccttctacaccggcggaggcctgatgaccttctacctgtggcggatcatctacatgagcatgatcctgagcgcccgcagcagactgaaggtgttcttcgactggatcaagctggccttcttcaagagggacttcttcaagggcctgtga

SEQ ID NO: 810 - DNA, 1542 bp, Artificial Sequence
  source: /note="Description of Artificial Sequence: Synthetic polynucleotide"
atgctgagcaagaacctgtacagcaacaagcggctgctgaccagcaccaacaccctcgtgcgcttcgccagcaccagatccaccggcgtcgaaaacagcggggctggccccaccagcttcaagaccatgaagatcatcgacccccagcacagcgacaagcccaacgtgctgatcctgggctctggctggggcgccatcagctttctgaagcacatcgacaccaagaagtacaacgtcagcatcgtgagccccagaagctacttcctgttcacccccctgctgcccagcgcccctgtgggaaccgtggacgagaagtccatcatcgagcccatcgtgaacttcgccctgaagaaaaagggcaacgtcacctactacgaggccgaggccaccagcatcaaccccgaccggaacaccgtgaccatcaagagcctgagcgccgtgtcccagctgtaccagcccgagaaccacctgggcctgcaccaggccgagcccgccgagattaagtacgactacctgatcagcgccgtgggcgccgagcccaacacctttggaatccccggcgtgaccgactacggccacttcctgaaagagatccccaacagcctggaaatccggcggaccttcgccgccaacctggaaaaggccaacctgctgcctaagggcgaccccgagcggagaaggctgctgagcatcgtggtcgtgggcggaggccccacaggcgtggaagctgctggcgagctgcaggactacgtgcaccaggacctgcggaagttcctgcccgccctggccgaggaaatccagattcacctggtggaagccctgcccatcgtgctgaacatgttcgagaagaagctgagcagctacgcccagagccacctggaaaacacctccatcaaggtgcacctgagaaccgccgtggccaaggtggaagagaagcagctgctggccaagaccaagcacgaggacggcaagattaccgaggaaaccatcccctacggcaccctgatttgggccaccggcaacaaggccagacccgtgatcaccgacctgttcaagaagatccccgagcagaacagcagcaagcggggcctggccgtgaacgacttcctgcaggtcaaaggcagcaacaacatcttcgccatcggcgacaacgcctttgccggcctgcctcctacagcccaggtggcccaccaggaagccgagtacctggccaagaacttcgacaagatggcccagatccccaatttccagaagaacctgtcctcccggaaggataagatcgacctgctgttcgaggaaaacaacttcaagcccttcaagtacaacgacctgggcgccctggcctacctgggcagcgaaagagccattgccaccatcagaagcggcaagcggaccttctacaccggcggaggcctgatgaccttctacctgtggcggatcatctacatgagcatgatcctgagcgcccgcagcagactgaaggtgttcttcgactggatcaagctggccttcttcaagagggacttcttcaagggcctgtga

SEQ ID NO: 811 - DNA, 1542 bp, Artificial Sequence
  source: /note="Description of Artificial Sequence: Synthetic polynucleotide"
atgctgagcaagaacctgtacagcaacaagcggctgctgaccagcaccaacaccctcgtgcgcttcgccagcaccagatccaccggcgtcgaaaacagcggggctggccccaccagcttcaagaccatgaaggtcatcgacccccagcacagcgacaagcccaacgtgctgatcctgggctctggctggggcgccatcagctttctgaagcacatcgacaccaagaagtacaacgtcagcatcatcagccccagaagctacttcatctacacccccctgctgcccagcgcccctgtgggaaccgtggacgagaagtccatcatcgagcccatcgtgaacttcgccctgaagaaaaagggcaacgtcacctactacgaggccgaggccaccagcatcaaccccgaccggaacaccgtgaccatcaagagcctgagcgccgtgtcccagctgtaccagcccgagaaccacctgggcctgcaccaggccgagcccgccgagattaagtacgactacctgatcagcgccgtgggcgccgagcccaacacctttggaatccccggcgtgaccgactacggccacttcctgaaagagatccccaacagcctggaaatccggcggaccttcgccgccaacctggaaaaggccaacctgctgcctaagggcgaccccgagcggagaaggctgctgagcatcgtggtcgtgggcggaggccccacaggcgtggaagctgctggcgagctgcaggactacgtgcaccaggacctgcggaagttcctgcccgccctggccgaggaaatccagattcacctggtggaagccctgcccatcgtgctgaacatgttcgagaagaagctgagcagctacgcccagagccacctggaaaacacctccatcaaggtgcacctgagaaccgccgtggccaaggtggaagagaagcagctgctggccaagaccaagcacgaggacggcaagattaccgaggaaaccatcccctacggcaccctgatttgggccaccggcaacaaggccagacccgtgatcaccgacctgttcaagaagatccccgagcagaacagcagcaagcggggcctggccgtgaacgacttcctgcaggtcaaaggcagcaacaacatcttcgccatcggcgacaacgcctttgccggcctgcctcctacagcccaggtggcccaccaggaagccgagtacctggccaagaacttcgacaagatggcccagatccccaatttccagaagaacctgtcctcccggaaggataagatcgacctgctgttcgaggaaaacaacttcaagcccttcaagtacaacgacctgggcgccctggcctacctgggcagcgaaagagccattgccaccatcagaagcggcaagcggaccttctacaccggcggaggcctgatgaccttctacctgtggcggatcatctacatgagcatgatcctgagcgcccgcagcagactgaaggtgttcttcgactggatcaagctggccttcttcaagagggacttcttcaagggcctgtga

SEQ ID NO: 812 - DNA, 1542 bp, Artificial Sequence
  source: /note="Description of Artificial Sequence: Synthetic polynucleotide"
atgctgagcaagaacctgtacagcaacaagcggctgctgaccagcaccaacaccctcgtgcgcttcgccagcaccagatccaccggcgtcgaaaacagcggggctggccccaccagcttcaagaccatgaagatcatcgacccccagcacagcgacaagcccaacgtgctgatcctgggctctggctggggcgccatcagctttctgaagcacatcgacaccaagaagtacaacgtcagcatcatcagccccagaagctacttcatctacacccccctgctgcccagcgcccctgtgggaaccgtggacgagaagtccatcatcgagcccatcgtgaacttcgccctgaagaaaaagggcaacgtcacctactacgaggccgaggccaccagcatcaaccccgaccggaacaccgtgaccatcaagagcctgagcgccgtgtcccagctgtaccagcccgagaaccacctgggcctgcaccaggccgagcccgccgagattaagtacgactacctgatcagcgccgtgggcgccgagcccaacacctttggaatccccggcgtgaccgactacggccacttcctgaaagagatccccaacagcctggaaatccggcggaccttcgccgccaacctggaaaaggccaacctgctgcctaagggcgaccccgagcggagaaggctgctgagcatcgtggtcgtgggcggaggccccacaggcgtggaagctgctggcgagctgcaggactacgtgcaccaggacctgcggaagttcctgcccgccctggccgaggaaatccagattcacctggtggaagccctgcccatcgtgctgaacatgttcgagaagaagctgagcagctacgcccagagccacctggaaaacacctccatcaaggtgcacctgagaaccgccgtggccaaggtggaagagaagcagctgctggccaagaccaagcacgaggacggcaagattaccgaggaaaccatcccctacggcaccctgatttgggccaccggcaacaaggccagacccgtgatcaccgacctgttcaagaagatccccgagcagaacagcagcaagcggggcctggccgtgaacgacttcctgcaggtcaaaggcagcaacaacatcttcgccatcggcgacaacgcctttgccggcctgcctcctacagcccaggtggcccaccaggaagccgagtacctggccaagaacttcgacaagatggcccagatccccaatttccagaagaacctgtcctcccggaaggataagatcgacctgctgttcgaggaaaacaacttcaagcccttcaagtacaacgacctgggcgccctggcctacctgggcagcgaaagagccattgccaccatcagaagcggcaagcggaccttctacaccggcggaggcctgatgaccttctacctgtggcggatcctgtacatgagcatgatcctgagcgcccgcagcagactgaaggtgttcttcgactggatcaagctggccttcttcaagagggacttcttcaagggcctgtga

SEQ ID NO: 813 - DNA, 1542 bp, Artificial Sequence
  source: /note="Description of Artificial Sequence: Synthetic polynucleotide"
atgctgagcaagaacctgtacagcaacaagcggctgctgaccagcaccaacaccctcgtgcgcttcgccagcaccagatccaccggcgtcgaaaacagcggggctggccccaccagcttcaagaccatgaagatcatcgacccccagcacagcgacaagcccaacgtgctgatcctgggctctggctggggcgccatcagctttctgaagcacatcgacaccaagaagtacaacgtcagcatcatcagccccagaagctacttcatctacacccccctgctgcccagcgcccctgtgggaaccgtggacgagaagtccatcatcgagcccatcgtgaacttcgccctgaagaaaaagggcaacgtcacctactacgaggccgaggccaccagcatcaaccccgaccggaacaccgtgaccatcaagagcctgagcgccgtgtcccagctgtaccagcccgagaaccacctgggcctgcaccaggccgagcccgccgagattaagtacgactacctgatcagcgccgtgggcgccgagcccaacacctttggaatccccggcgtgaccgactacggccacttcctgaaagagatccccaacagcctggaaatccggcggaccttcgccgccaacctggaaaaggccaacctgctgcctaagggcgaccccgagcggagaaggctgctgagcatcgtggtcgtgggcggaggccccacaggcgtggaagctgctggcgagctgcaggactacgtgcaccaggacctgcggaagttcctgcccgccctggccgaggaaatccagattcacctggtggaagccctgcccatcgtgctgaacatgttcgagaagaagctgagcagctacgcccagagccacctggaaaacacctccatcaaggtgcacctgagaaccgccgtggccaaggtggaagagaagcagctgctggccaagaccaagcacgaggacggcaagattaccgaggaaaccatcccctacggcaccctgatttgggccaccggcaacaaggccagacccgtgatcaccgacctgttcaagaagatccccgagcagaacagcagcaagcggggcctggccgtgaacgacttcctgcaggtcaaaggcagcaacaacatcttcgccatcggcgacaacgcctttgccggcctgcctcctacagcccaggtggcccaccaggaagccgagtacctggccaagaacttcgacaagatggcccagatccccaatttccagaagaacctgtcctcccggaaggataagatcgacctgctgttcgaggaaaacaacttcaagcccttcaagtacaacgacctgggcgccctggcctacctgggcagcgaaagagccattgccaccatcagaagcggcaagcggaccttctacaccggcggaggcctgatgaccttctacctgtggcggatcatctacctgagcatgatcctgagcgcccgcagcagactgaaggtgttcttcgactggatcaagctggccttcttcaagagggacttcttcaagggcctgtga

SEQ ID NO: 814 - DNA, 1542 bp, Artificial Sequence
  source: /note="Description of Artificial Sequence: Synthetic polynucleotide"
atgctgagcaagaacctgtacagcaacaagcggctgctgaccagcaccaacaccctcgtgcgcttcgccagcaccagatccaccggcgtcgaaaacagcggggctggccccaccagcttcaagaccatgaagatcatcgacccccagcacagcgacaagcccaacgtgctgatcctgggctctggctggggcgccatcagctttctgaagcacatcgacaccaagaagtacaacgtcagcatcatcagccccagaagctacttcatctacacccccctgctgcccagcgcccctgtgggaaccgtggacgagaagtccatcatcgagcccatcgtgaacttcgccctgaagaaaaagggcaacgtcacctactacgaggccgaggccaccagcatcaaccccgaccggaacaccgtgaccatcaagagcctgagcgccgtgtcccagctgtaccagcccgagaaccacctgggcctgcaccaggccgagcccgccgagattaagtacgactacctgatcagcgccgtgggcgccgagcccaacacctttggaatccccggcgtgaccgactacggccacttcctgaaagagatccccaacagcctggaaatccggcggaccttcgccgccaacctggaaaaggccaacctgctgcctaagggcgaccccgagcggagaaggctgctgagcatcgtggtcgtgggcggaggccccacaggcgtggaagctgctggcgagctgcaggactacgtgcaccaggacctgcggaagttcctgcccgccctggccgaggaagtgcagattcacctggtggaagccctgcccatcgtgctgaacatgttcgagaagaagctgagcagctacgcccagagccacctggaaaacacctccatcaaggtgcacctgagaaccgccgtggccaaggtggaagagaagcagctgctggccaagaccaagcacgaggacggcaagattaccgaggaaaccatcccctacggcaccctgatttgggccaccggcaacaaggccagacccgtgatcaccgacctgttcaagaagatccccgagcagaacagcagcaagcggggcctggccgtgaacgacttcctgcaggtcaaaggcagcaacaacatcttcgccatcggcgacaacgcctttgccggcctgcctcctacagcccaggtggcccaccaggaagccgagtacctggccaagaacttcgacaagatggcccagatccccaatttccagaagaacctgtcctcccggaaggataagatcgacctgctgttcgaggaaaacaacttcaagcccttcaagtacaacgacctgggcgccctggcctacctgggcagcgaaagagccattgccaccatcagaagcggcaagcggaccttctacaccggcggaggcctgatgaccttctacctgtggcggatcatctacatgagcatgatcctgagcgcccgcagcagactgaaggtgttcttcgactggatcaagctggccttcttcaagagggacttcttcaagggcctgtga

SEQ ID NO: 815 - DNA, 1542 bp, Artificial Sequence
  source: /note="Description of Artificial Sequence: Synthetic polynucleotide"
atgctgagcaagaacctgtacagcaacaagcggctgctgaccagcaccaacaccctcgtgcgcttcgccagcaccagatccaccggcgtcgaaaacagcggggctggccccaccagcttcaagaccatgaagatcatcgacccccagcacagcgacaagcccaacgtgctgatcctgggctctggctggggcgccatcagctttctgaagcacatcgacaccaagaagtacaacgtcagcatcatcagccccagaagctacttcctgtacacccccctgctgcccagcgcccctgtgggaaccgtggacgagaagtccatcatcgagcccatcgtgaacttcgccctgaagaaaaagggcaacgtcacctactacgaggccgaggccaccagcatcaaccccgaccggaacaccgtgaccatcaagagcctgagcgccgtgtcccagctgtaccagcccgagaaccacctgggcctgcaccaggccgagcccgccgagattaagtacgactacctgatcagcgccgtgggcgccgagcccaacacctttggaatccccggcgtgaccgactacggccacttcctgaaagagatccccaacagcctggaaatccggcggaccttcgccgccaacctggaaaaggccaacctgctgcctaagggcgaccccgagcggagaaggctgctgagcatcgtggtcgtgggcggaggccccacaggcgtggaagctgctggcgagctgcaggactacgtgcaccaggacctgcggaagttcctgcccgccctggccgaggaaatccagattcacctggtggaagccctgcccatcgtgctgaacatgttcgagaagaagctgagcagctacgcccagagccacctggaaaacacctccatcaaggtgcacctgagaaccgccgtggccaaggtggaagagaagcagctgctggccaagaccaagcacgaggacggcaagattaccgaggaaaccatcccctacggcaccctgatttgggccaccggcaacaaggccagacccgtgatcaccgacctgttcaagaagatccccgagcagaacagcagcaagcggggcctggccgtgaacgacttcctgcaggtcaaaggcagcaacaacatcttcgccatcggcgacaacgcctttgccggcctgcctcctacagcccaggtggcccaccaggaagccgagtacctggccaagaacttcgacaagatggcccagatccccaatttccagaagaacctgtcctcccggaaggataagatcgacctgctgttcgaggaaaacaacttcaagcccttcaagtacaacgacctgggcgccctggcctacctgggcagcgaaagagccattgccaccatcagaagcggcaagcggaccttctacaccggcggaggcctgatgaccttctacctgtggcggatcatctacatgagcatgatcctgagcgcccgcagcagactgaaggtgttcttcgactggatcaagctggccttcttcaagagggacttcttcaagggcctgtga

SEQ ID NO: 816 - DNA, 1542 bp, Artificial Sequence
  source: /note="Description of Artificial Sequence: Synthetic polynucleotide"
atgctgagcaagaacctgtacagcaacaagcggctgctgaccagcaccaacaccctcgtgcgcttcgccagcaccagatccaccggcgtcgaaaacagcggggctggccccaccagcttcaagaccatgaagatcatcgacccccagcacagcgacaagcccaacgtgctgatcctgggctctggctggggcgccatcagctttctgaagcacatcgacaccaagaagtacaacgtcagcatcatcagccccagaagctacttcatcttcacccccctgctgcccagcgcccctgtgggaaccgtggacgagaagtccatcatcgagcccatcgtgaacttcgccctgaagaaaaagggcaacgtcacctactacgaggccgaggccaccagcatcaaccccgaccggaacaccgtgaccatcaagagcctgagcgccgtgtcccagctgtaccagcccgagaaccacctgggcctgcaccaggccgagcccgccgagattaagtacgactacctgatcagcgccgtgggcgccgagcccaacacctttggaatccccggcgtgaccgactacggccacttcctgaaagagatccccaacagcctggaaatccggcggaccttcgccgccaacctggaaaaggccaacctgctgcctaagggcgaccccgagcggagaaggctgctgagcatcgtggtcgtgggcggaggccccacaggcgtggaagctgctggcgagctgcaggactacgtgcaccaggacctgcggaagttcctgcccgccctggccgaggaaatccagattcacctggtggaagccctgcccatcgtgctgaacatgttcgagaagaagctgagcagctacgcccagagccacctggaaaacacctccatcaaggtgcacctgagaaccgccgtggccaaggtggaagagaagcagctgctggccaagaccaagcacgaggacggcaagattaccgaggaaaccatcccctacggcaccctgatttgggccaccggcaacaaggccagacccgtgatcaccgacctgttcaagaagatccccgagcagaacagcagcaagcggggcctggccgtgaacgacttcctgcaggtcaaaggcagcaacaacatcttcgccatcggcgacaacgcctttgccggcctgcctcctacagcccaggtggcccaccaggaagccgagtacctggccaagaacttcgacaagatggcccagatccccaatttccagaagaacctgtcctcccggaaggataagatcgacctgctgttcgaggaaaacaacttcaagcccttcaagtacaacgacctgggcgccctggcctacctgggcagcgaaagagccattgccaccatcagaagcggcaagcggaccttctacaccggcggaggcctgatgaccttctacctgtggcggatcatctacatgagcatgatcctgagcgcccgcagcagactgaaggtgttcttcgactggatcaagctggccttcttcaagagggacttcttcaagggcctgtga

SEQ ID NO: 817 - DNA, 1542 bp, Artificial Sequence
  source: /note="Description of Artificial Sequence: Synthetic polynucleotide"
atgctgagcaagaacctgtacagcaacaagcggctgctgaccagcaccaacaccctcgtgcgcttcgccagcaccagatccaccggcgtcgaaaacagcggggctggccccaccagcttcaagaccatgaaggtcatcgacccccagcacagcgacaagcccaacgtgctgatcctgggctctggctggggcgccatcagctttctgaagcacatcgacaccaagaagtacaacgtcagcatcgtgagccccagaagctacttcatctacacccccctgctgcccagcgcccctgtgggaaccgtggacgagaagtccatcatcgagcccatcgtgaacttcgccctgaagaaaaagggcaacgtcacctactacgaggccgaggccaccagcatcaaccccgaccggaacaccgtgaccatcaagagcctgagcgccgtgtcccagctgtaccagcccgagaaccacctgggcctgcaccaggccgagcccgccgagattaagtacgactacctgatcagcgccgtgggcgccgagcccaacacctttggaatccccggcgtgaccgactacggccacttcctgaaagagatccccaacagcctggaaatccggcggaccttcgccgccaacctggaaaaggccaacctgctgcctaagggcgaccccgagcggagaaggctgctgagcatcgtggtcgtgggcggaggccccacaggcgtggaagctgctggcgagctgcaggactacgtgcaccaggacctgcggaagttcctgcccgccctggccgaggaaatccagattcacctggtggaagccctgcccatcgtgctgaacatgttcgagaagaagctgagcagctacgcccagagccacctggaaaacacctccatcaaggtgcacctgagaaccgccgtggccaaggtggaagagaagcagctgctggccaagaccaagcacgaggacggcaagattaccgaggaaaccatcccctacggcaccctgatttgggccaccggcaacaaggccagacccgtgatcaccgacctgttcaagaagatccccgagcagaacagcagcaagcggggcctggccgtgaacgacttcctgcaggtcaaaggcagcaacaacatcttcgccatcggcgacaacgcctttgccggcctgcctcctacagcccaggtggcccaccaggaagccgagtacctggccaagaacttcgacaagatggcccagatccccaatttccagaagaacctgtcctcccggaaggataagatcgacctgctgttcgaggaaaacaacttcaagcccttcaagtacaacgacctgggcgccctggcctacctgggcagcgaaagagccattgccaccatcagaagcggcaagcggaccttctacaccggcggaggcctgatgaccttctacctgtggcggatcatctacatgagcatgatcctgagcgcccgcagcagactgaaggtgttcttcgactggatcaagctggccttcttcaagagggacttcttcaagggcctgtga

SEQ ID NO: 818 - DNA, 1542 bp, Artificial Sequence
  source: /note="Description of Artificial Sequence: Synthetic polynucleotide"
atgctgagcaagaacctgtacagcaacaagcggctgctgaccagcaccaacaccctcgtgcgcttcgccagcaccagatccaccggcgtcgaaaacagcggggctggccccaccagcttcaagaccatgaagatcatcgacccccagcacagcgacaagcccaacgtgctgatcctgggctctggctggggcgccatcagctttctgaagcacatcgacaccaagaagtacaacgtcagcatcgtgagccccagaagctacttcatctacacccccctgctgcccagcgcccctgtgggaaccgtggacgagaagtccatcatcgagcccatcgtgaacttcgccctgaagaaaaagggcaacgtcacctactacgaggccgaggccaccagcatcaaccccgaccggaacaccgtgaccatcaagagcctgagcgccgtgtcccagctgtaccagcccgagaaccacctgggcctgcaccaggccgagcccgccgagattaagtacgactacctgatcagcgccgtgggcgccgagcccaacacctttggaatccccggcgtgaccgactacggccacttcctgaaagagatccccaacagcctggaaatccggcggaccttcgccgccaacctggaaaaggccaacctgctgcctaagggcgaccccgagcggagaaggctgctgagcatcgtggtcgtgggcggaggccccacaggcgtggaagctgctggcgagctgcaggactacgtgcaccaggacctgcggaagttcctgcccgccctggccgaggaaatccagattcacctggtggaagccctgcccatcgtgctgaacatgttcgagaagaagctgagcagctacgcccagagccacctggaaaacacctccatcaaggtgcacctgagaaccgccgtggccaaggtggaagagaagcagctgctggccaagaccaagcacgaggacggcaagattaccgaggaaaccatcccctacggcaccctgatttgggccaccggcaacaaggccagacccgtgatcaccgacctgttcaagaagatccccgagcagaacagcagcaagcggggcctggccgtgaacgacttcctgcaggtcaaaggcagcaacaacatcttcgccatcggcgacaacgcctttgccggcctgcctcctacagcccaggtggcccaccaggaagccgagtacctggccaagaacttcgacaagatggcccagatccccaatttccagaagaacctgtcctcccggaaggataagatcgacctgctgttcgaggaaaacaacttcaagcccttcaagtacaacgacctgggcgccctggcctacctgggcagcgaaagagccattgccaccatcagaagcggcaagcggaccttctacaccggcggaggcctgatgaccttctacctgtggcggatcctgtacatgagcatgatcctgagcgcccgcagcagactgaaggtgttcttcgactggatcaagctggccttcttcaagagggacttcttcaagggcctgtga

SEQ ID NO: 819 - DNA, 1542 bp, Artificial Sequence
  source: /note="Description of Artificial Sequence: Synthetic polynucleotide"
atgctgagcaagaacctgtacagcaacaagcggctgctgaccagcaccaacaccctcgtgcgcttcgccagcaccagatccaccggcgtcgaaaacagcggggctggccccaccagcttcaagaccatgaagatcatcgacccccagcacagcgacaagcccaacgtgctgatcctgggctctggctggggcgccatcagctttctgaagcacatcgacaccaagaagtacaacgtcagcatcgtgagccccagaagctacttcatctacacccccctgctgcccagcgcccctgtgggaaccgtggacgagaagtccatcatcgagcccatcgtgaacttcgccctgaagaaaaagggcaacgtcacctactacgaggccgaggccaccagcatcaaccccgaccggaacaccgtgaccatcaagagcctgagcgccgtgtcccagctgtaccagcccgagaaccacctgggcctgcaccaggccgagcccgccgagattaagtacgactacctgatcagcgccgtgggcgccgagcccaacacctttggaatccccggcgtgaccgactacggccacttcctgaaagagatccccaacagcctggaaatccggcggaccttcgccgccaacctggaaaaggccaacctgctgcctaagggcgaccccgagcggagaaggctgctgagcatcgtggtcgtgggcggaggccccacaggcgtggaagctgctggcgagctgcaggactacgtgcaccaggacctgcggaagttcctgcccgccctggccgaggaaatccagattcacctggtggaagccctgcccatcgtgctgaacatgttcgagaagaagctgagcagctacgcccagagccacctggaaaacacctccatcaaggtgcacctgagaaccgccgtggccaaggtggaagagaagcagctgctggccaagaccaagcacgaggacggcaagattaccgaggaaaccatcccctacggcaccctgatttgggccaccggcaacaaggccagacccgtgatcaccgacctgttcaagaagatccccgagcagaacagcagcaagcggggcctggccgtgaacgacttcctgcaggtcaaaggcagcaacaacatcttcgccatcggcgacaacgcctttgccggcctgcctcctacagcccaggtggcccaccaggaagccgagtacctggccaagaacttcgacaagatggcccagatccccaatttccagaagaacctgtcctcccggaaggataagatcgacctgctgttcgaggaaaacaacttcaagcccttcaagtacaacgacctgggcgccctggcctacctgggcagcgaaagagccattgccaccatcagaagcggcaagcggaccttctacaccggcggaggcctgatgaccttctacctgtggcggatcatctacctgagcatgatcctgagcgcccgcagcagactgaaggtgttcttcgactggatcaagctggccttcttcaagagggacttcttcaagggcctgtga

SEQ ID NO: 820 - DNA, 1542 bp, Artificial Sequence
  source: /note="Description of Artificial Sequence: Synthetic polynucleotide"
atgctgagcaagaacctgtacagcaacaagcggctgctgaccagcaccaacaccctcgtgcgcttcgccagcaccagatccaccggcgtcgaaaacagcggggctggccccaccagcttcaagaccatgaagatcatcgacccccagcacagcgacaagcccaacgtgctgatcctgggctctggctggggcgccatcagctttctgaagcacatcgacaccaagaagtacaacgtcagcatcgtgagccccagaagctacttcatctacacccccctgctgcccagcgcccctgtgggaaccgtggacgagaagtccatcatcgagcccatcgtgaacttcgccctgaagaaaaagggcaacgtcacctactacgaggccgaggccaccagcatcaaccccgaccggaacaccgtgaccatcaagagcctgagcgccgtgtcccagctgtaccagcccgagaaccacctgggcctgcaccaggccgagcccgccgagattaagtacgactacctgatcagcgccgtgggcgccgagcccaacacctttggaatccccggcgtgaccgactacggccacttcctgaaagagatccccaacagcctggaaatccggcggaccttcgccgccaacctggaaaaggccaacctgctgcctaagggcgaccccgagcggagaaggctgctgagcatcgtggtcgtgggcggaggccccacaggcgtggaagctgctggcgagctgcaggactacgtgcaccaggacctgcggaagttcctgcccgccctggccgaggaagtgcagattcacctggtggaagccctgcccatcgtgctgaacatgttcgagaagaagctgagcagctacgcccagagccacctggaaaacacctccatcaaggtgcacctgagaaccgccgtggccaaggtggaagagaagcagctgctggccaagaccaagcacgaggacggcaagattaccgaggaaaccatcccctacggcaccctgatttgggccaccggcaacaaggccagacccgtgatcaccgacctgttcaagaagatccccgagcagaacagcagcaagcggggcctggccgtgaacgacttcctgcaggtcaaaggcagcaacaacatcttcgccatcggcgacaacgcctttgccggcctgcctcctacagcccaggtggcccaccaggaagccgagtacctggccaagaacttcgacaagatggcccagatccccaatttccagaagaacctgtcctcccggaaggataagatcgacctgctgttcgaggaaaacaacttcaagcccttcaagtacaacgacctgggcgccctggcctacctgggcagcgaaagagccattgccaccatcagaagcggcaagcggaccttctacaccggcggaggcctgatgaccttctacctgtggcggatcatctacatgagcatgatcctgagcgcccgcagcagactgaaggtgttcttcgactggatcaagctggccttcttcaagagggacttcttcaagggcctgtga

SEQ ID NO: 821 - DNA, 1542 bp, Artificial Sequence
  source: /note="Description of Artificial Sequence: Synthetic polynucleotide"
atgctgagcaagaacctgtacagcaacaagcggctgctgaccagcaccaacaccctcgtgcgcttcgccagcaccagatccaccggcgtcgaaaacagcggggctggccccaccagcttcaagaccatgaagatcatcgacccccagcacagcgacaagcccaacgtgctgatcctgggctctggctggggcgccatcagctttctgaagcacatcgacaccaagaagtacaacgtcagcatcgtgagccccagaagctacttcctgtacacccccctgctgcccagcgcccctgtgggaaccgtggacgagaagtccatcatcgagcccatcgtgaacttcgccctgaagaaaaagggcaacgtcacctactacgaggccgaggccaccagcatcaaccccgaccggaacaccgtgaccatcaagagcctgagcgccgtgtcccagctgtaccagcccgagaaccacctgggcctgcaccaggccgagcccgccgagattaagtacgactacctgatcagcgccgtgggcgccgagcccaacacctttggaatccccggcgtgaccgactacggccacttcctgaaagagatccccaacagcctggaaatccggcggaccttcgccgccaacctggaaaaggccaacctgctgcctaagggcgaccccgagcggagaaggctgctgagcatcgtggtcgtgggcggaggccccacaggcgtggaagctgctggcgagctgcaggactacgtgcaccaggacctgcggaagttcctgcccgccctggccgaggaaatccagattcacctggtggaagccctgcccatcgtgctgaacatgttcgagaagaagctgagcagctacgcccagagccacctggaaaacacctccatcaaggtgcacctgagaaccgccgtggccaaggtggaagagaagcagctgctggccaagaccaagcacgaggacggcaagattaccgaggaaaccatcccctacggcaccctgatttgggccaccggcaacaaggccagacccgtgatcaccgacctgttcaagaagatccccgagcagaacagcagcaagcggggcctggccgtgaacgacttcctgcaggtcaaaggcagcaacaacatcttcgccatcggcgacaacgcctttgccggcctgcctcctacagcccaggtggcccaccaggaagccgagtacctggccaagaacttcgacaagatggcccagatccccaatttccagaagaacctgtcctcccggaaggataagatcgacctgctgttcgaggaaaacaacttcaagcccttcaagtacaacgacctgggcgccctggcctacctgggcagcgaaagagccattgccaccatcagaagcggcaagcggaccttctacaccggcggaggcctgatgaccttctacctgtggcggatcatctacatgagcatgatcctgagcgcccgcagcagactgaaggtgttcttcgactggatcaagctggccttcttcaagagggacttcttcaagggcctgtga

SEQ ID NO: 822 - DNA, 1542 bp, Artificial Sequence
  source: /note="Description of Artificial Sequence: Synthetic polynucleotide"
atgctgagcaagaacctgtacagcaacaagcggctgctgaccagcaccaacaccctcgtgcgcttcgccagcaccagatccaccggcgtcgaaaacagcggggctggccccaccagcttcaagaccatgaagatcatcgacccccagcacagcgacaagcccaacgtgctgatcctgggctctggctggggcgccatcagctttctgaagcacatcgacaccaagaagtacaacgtcagcatcgtgagccccagaagctacttcatcttcacccccctgctgcccagcgcccctgtgggaaccgtggacgagaagtccatcatcgagcccatcgtgaacttcgccctgaagaaaaagggcaacgtcacctactacgaggccgaggccaccagcatcaaccccgaccggaacaccgtgaccatcaagagcctgagcgccgtgtcccagctgtaccagcccgagaaccacctgggcctgcaccaggccgagcccgccgagattaagtacgactacctgatcagcgccgtgggcgccgagcccaacacctttggaatccccggcgtgaccgactacggccacttcctgaaagagatccccaacagcctggaaatccggcggaccttcgccgccaacctggaaaaggccaacctgctgcctaagggcgaccccgagcggagaaggctgctgagcatcgtggtcgtgggcggaggccccacaggcgtggaagctgctggcgagctgcaggactacgtgcaccaggacctgcggaagttcctgcccgccctggccgaggaaatccagattcacctggtggaagccctgcccatcgtgctgaacatgttcgagaagaagctgagcagctacgcccagagccacctggaaaacacctccatcaaggtgcacctgagaaccgccgtggccaaggtggaagagaagcagctgctggccaagaccaagcacgaggacggcaagattaccgaggaaaccatcccctacggcaccctgatttgggccaccggcaacaaggccagacccgtgatcaccgacctgttcaagaagatccccgagcagaacagcagcaagcggggcctggccgtgaacgacttcctgcaggtcaaaggcagcaacaacatcttcgccatcggcgacaacgcctttgccggcctgcctcctacagcccaggtggcccaccaggaagccgagtacctggccaagaacttcgacaagatggcccagatccccaatttccagaagaacctgtcctcccggaaggataagatcgacctgctgttcgaggaaaacaacttcaagcccttcaagtacaacgacctgggcgccctggcctacctgggcagcgaaagagccattgccaccatcagaagcggcaagcggaccttctacaccggcggaggcctgatgaccttctacctgtggcggatcatctacatgagcatgatcctgagcgcccgcagcagactgaaggtgttcttcgactggatcaagctggccttcttcaagagggacttcttcaagggcctgtga

SEQ ID NO: 823 - DNA, 1542 bp, Artificial Sequence
  source: /note="Description of Artificial Sequence: Synthetic polynucleotide"
atgctgagcaagaacctgtacagcaacaagcggctgctgaccagcaccaacaccctcgtgcgcttcgccagcaccagatccaccggcgtcgaaaacagcggggctggccccaccagcttcaagaccatgaagatcatcgacccccagcacagcgacaagcccaacgtgctgatcctgggctctggctggggcgccatcagctttctgaagcacatcgacaccaagaagtacaacgtcagcatcatcagccccagaagctacttcatctacacccccctgctgcccagcgcccctgtgggaaccgtggacgagaagtccatcatcgagcccatcgtgaacttcgccctgaagaaaaagggcaacgtcacctactacgaggccgaggccaccagcatcaaccccgaccggaacaccgtgaccatcaagagcctgagcgccgtgtcccagctgtaccagcccgagaaccacctgggcctgcaccaggccgagcccgccgagattaagtacgactacctgatcagcgccgtgggcgccgagcccaacacctttggaatccccggcgtgaccgactacggccacttcctgaaagagatccccaacagcctggaaatccggcggaccttcgccgccaacctggaaaaggccaacctgctgcctaagggcgaccccgagcggagaaggctgctgagcatcgtggtcgtgggcggaggccccacaggcgtggaagctgctggcgagctgcaggactacgtgcaccaggacctgcggaagttcctgcccgccctggccgaggaaatccagattcacctggtggaagccctgcccatcgtgctgaacatgttcgagaagaagctgagcagctacgcccagagccacctggaaaacacctccatcaaggtgcacctgagaaccgccgtggccaaggtggaagagaagcagctgctggccaagaccaagcacgaggacggcaagattaccgaggaaaccatcccctacggcaccctgatttgggccaccggcaacaaggccagacccgtgatcaccgacctgttcaagaagatccccgagcagaacagcagcaagcggggcctggccgtgaacgacttcctgcaggtcaaaggcagcaacaacatcttcgccatcggcgacaacgcctttgccggcctgcctcctacagcccaggtggcccaccaggaagccgagtacctggccaagaacttcgacaagatggcccagatccccaatttccagaagaacctgtcctcccggaaggataagatcgacctgctgttcgaggaaaacaacttcaagcccttcaagtacaacgacctgggcgccctggcctacctgggcagcgaaagagccattgccaccatcagaagcggcaagcggaccttctacaccggcggaggcctgatgaccttctacctgtggcggatcatctacatgagcatgatcctgagcgcccgcagcagactgaaggtgttcttcgactggatcaagctggccttcttcaagagggacttcttcaagggcctgtga

SEQ ID NO: 824 - DNA, 1542 bp, Artificial Sequence
  source: /note="Description of Artificial Sequence: Synthetic polynucleotide"
atgctgagcaagaacctgtacagcaacaagcggctgctgaccagcaccaacaccctcgtgcgcttcgccagcaccagatccaccggcgtcgaaaacagcggggctggccccaccagcttcaagaccatgaagatcatcgacccccagcacagcgacaagcccaacgtgctgatcctgggctctggctggggcgccatcagctttctgaagcacatcgacaccaagaagtacaacgtcagcatcgtgagccccagaagctacttcatctacacccccctgctgcccagcgcccctgtgggaaccgtggacgagaagtccatcatcgagcccatcgtgaacttcgccctgaagaaaaagggcaacgtcacctactacgaggccgaggccaccagcatcaaccccgaccggaacaccgtgaccatcaagagcctgagcgccgtgtcccagctgtaccagcccgagaaccacctgggcctgcaccaggccgagcccgccgagattaagtacgactacctgatcagcgccgtgggcgccgagcccaacacctttggaatccccggcgtgaccgactacggccacttcctgaaagagatccccaacagcctggaaatccggcggaccttcgccgccaacctggaaaaggccaacctgctgcctaagggcgaccccgagcggagaaggctgctgagcatcgtggtcgtgggcggaggccccacaggcgtggaagctgctggcgagctgcaggactacgtgcaccaggacctgcggaagttcctgcccgccctggccgaggaaatccagattcacctggtggaagccctgcccatcgtgctgaacatgttcgagaagaagctgagcagctacgcccagagccacctggaaaacacctccatcaaggtgcacctgagaaccgccgtggccaaggtggaagagaagcagctgctggccaagaccaagcacgaggacggcaagattaccgaggaaaccatcccctacggcaccctgatttgggccaccggcaacaaggccagacccgtgatcaccgacctgttcaagaagatccccgagcagaacagcagcaagcggggcctggccgtgaacgacttcctgcaggtcaaaggcagcaacaacatcttcgccatcggcgacaacgcctttgccggcctgcctcctacagcccaggtggcccaccaggaagccgagtacctggccaagaacttcgacaagatggcccagatccccaatttccagaagaacctgtcctcccggaaggataagatcgacctgctgttcgaggaaaacaacttcaagcccttcaagtacaacgacctgggcgccctggcctacctgggcagcgaaagagccattgccaccatcagaagcggcaagcggaccttctacaccggcggaggcctgatgaccttctacctgtggcggatcatctacatgagcatgatcctgagcgcccgcagcagactgaaggtgttcttcgactggatcaagctggccttcttcaagagggacttcttcaagggcctgtga

SEQ ID NO: 825 - DNA, 1542 bp, Artificial Sequence
  source: /note="Description of Artificial Sequence: Synthetic polynucleotide"
atgctatcgaagaatttgtatagcaacaagaggctgctcacctcgacgaacaccctagtgagattcgcttccaccagatccacaggggtggaaaacagcggggcaggtcctaccagcttcaagaccatgaaagtcattgaccctcagcacagcgacaagccaaacgtgctgatactgggttctgggtggggcgctatttcgtttttaaagcacatcgacaccaagaagtacaacgtttccatcatcagccctagaagctatttcctgttcacgcctttgttaccctctgccccagttgggacagtagacgagaagtccattattgagcccatcgttaattttgccctcaagaaaaaggggaacgtcacctactacgaggcagaagccacctctatcaatcccgacaggaataccgttaccataaagtcattatctgccgttagccagctataccaacctgaaaaccatctggggctgcatcaagccgaacctgccgagattaagtacgattacctgatcagtgctgtaggtgcggaacctaacacatttggaattcctggggtgactgattacggccatttcctgaaggagattcccaacagcttggaaataagacggacctttgccgccaatctagagaaggctaacctgttgccaaagggcgatcccgaaagaagaagactgctgtccattgtcgtcgttggtggagggcccacaggtgtagaggctgctggtgaactgcaggattacgtgcaccaggacctgcggaagttcctccctgcattggccgaagaagtccaaattcacctggtcgaagccctgcccatcgttttgaacatgtttgagaagaagctttcatcatacgcgcagagccatttagaaaacacttcgatcaaggtgcatctgagaacggctgtggccaaagttgaagaaaagcaattgctggcaaagacgaaacacgaagacggtaaaataaccgaagaaaccatcccatacggtactttgatttgggccaccggcaacaaggcaagaccggtgatcaccgaccttttcaagaaaattcctgagcagaactcgtccaagagaggactggcagtgaatgactttttgcaagtcaaaggcagcaacaacattttcgccattggtgacaacgcctttgccgggttgcctcctacagcccaggtggcgcaccaggaggccgaatacttggccaagaattttgacaagatggctcaaatccccaatttccaaaagaacctatcttcaagaaaggataagattgatctcttgttcgaggagaacaacttcaaacccttcaaatacaacgacttaggtgccctggcatacctgggatccgaaagggccattgccaccatacgttccggtaagagaacattctacaccggtggtggcttaatgaccttctacttatggcggattttgtacctgtccatgattctatctgcccgctcgagattaaaggtgtttttcgactggatcaagttagcatttttcaaaagagacttctttaaaggactgtag

SEQ ID NO: 826 - DNA, 1542 bp, Artificial Sequence
  source: /note="Description of Artificial Sequence: Synthetic polynucleotide"
atgctgtcgaagaacctgtacagtaacaagaggttgctgacctcgacgaatacgctagtcagattcgcttccaccagatccaccggcgtggaaaactccggagcaggtcctacatcttttaagaccatgaaagtcattgaccctcagcacagcgacaaaccaaacgtgctgatactgggttctgggtggggagccatttcgtttttaaagcacattgacaccaagaagtacaacgttagcatcatcagccctagaagctacttcttatttacgcccttgttacctagcgcaccagttggaaccgtagacgagaagtcaattatcgagcccatcgtgaacttcgccctgaagaaaaaggggaacgttacctactatgaggcagaagccacctctatcaatcccgacaggaacaccgtgaccataaaatcattatctgccgtgagccagctataccaacccgaaaaccacctggggctgcatcaagcagaacctgctgaaattaagtacgattatttaatcagcgccgtaggcgccgagcctaacacctttggtattcccggcgtcactgattacggtcatttcctgaaagagatccccaacagcctggaaataagacggacttttgccgccaacctggagaaggctaacttattgcctaagggcgaccccgagagaagaagactgctgtccattgtcgtcgtgggtggtggccccactggtgtagaagccgctggtgaactacaggattacgtgcaccaggacctgcggaagtttctgcctgcattggccgaggaagtccagattcacctggtcgaagctctgcccatcgttttgaacatgtttgagaagaagcttagctcatacgcgcaatcacacttagaaaacacctccatcaaagtacatctgagaacggctgtcgccaaggttgaagaaaagcagttgttggccaagacgaaacacgaagacggtaaaataaccgaagaaactattccatacggtactttgatttgggccacgggtaacaaggcaagaccggtaatcacagaccttttcaagaaaattcccgagcaaaacagctccaagcggggattggcagtgaatgactttttgcaagtcaaaggcagcaacaacattttcgccattggtgacaatgcatttgctgggttgccaccaaccgcccaggtggcgcaccaagaggccgagtatttggccaagaattttgacaagatggctcaaataccaaatttccagaagaacctgtcttcaagaaaggataaaattgatctgttgttcgaggaaaacaactttaaacctttcaaatacaacgatttaggcgccctggcctacctgggatccgaaagggccattgcaaccatccgttccggcaagagaaccttttacaccggcggtggcttaatgaccttctacctgtggagaattttgtacttgagcatgatcctatctgccagatcgagattaaaggtgttcttcgactggattaaattagcctttttcaaaagagacttttttaaaggactgtga

SEQ ID NO: 827 - DNA, 1542 bp, Artificial Sequence
  source: /note="Description of Artificial Sequence: Synthetic polynucleotide"
atgctatcgaagaacttgtatagtaacaagaggctgctcacctcgaccaacacgctcgtcagattcgctagcaccagatccacaggggtcgaaaacagcggagctggtcctacctcttttaagaccatgaaagtcattgacccccagcacagcgacaaaccaaacgtgctgatactgggttctgggtggggagctatttcgtttctgaagcacattgacaccaagaagtacaacgtctccatcatcagccccagaagctatttcttattcacccctctgctgccctctgcacctgtgggaacagtagacgagaagtcaattatcgagcccatcgtgaacttcgccctcaagaaaaaggggaacgttacctactatgaggcagaagccacctctatcaatcccgaccggaacaccgttaccatcaaatcattaagcgccgttagccagctataccaacctgaaaaccatctagggctgcaccaagcagaacctgctgagattaagtacgactacttaatcagtgccgtgggtgcggaacctaacacatttggtatccctggcgtcactgactacggtcacttcctgaaggaaattcccaactctttggaaatacggagaaccttcgccgccaacctagagaaggctaacttactgccaaagggtgatcccgagagaagaaggctactgtccattgtcgtggttggcggtgggcctactggtgtggaggctgctggtgagctacaggattatgttcaccaggacctgagaaagtttctccctgcactggccgaagaagtgcagattcacttggtcgaagctctgcccatcgttttgaatatgtttgagaaaaagcttagcagctacgcgcaatcacatttagaaaacacctcgatcaaagtacacctgagaacggctgtcgccaaagttgaagaaaagcagctgttggccaagacgaaacacgaagacggcaagataaccgaagaaactattccatacggtaccttgatttgggccacgggtaacaaggcaagacccgtgatcaccgaccttttcaagaaaattcctgagcaaaactcgtccaagcggggattggcagtgaacgactttctgcaagtgaaaggcagcaacaacattttcgccatcggcgacaatgcatttgccgggttgcctccaacagcccaggtggcgcaccaagaggccgaatatttggccaagaatttcgataagatggctcagataccaaatttccaaaagaacctatcttcaagaaaggataaaattgacctcttgttcgaggaaaacaactttaaacctttcaagtacaacgatttaggtgccttagcatacctgggctccgaaagggccattgcaaccatcagatccggtaagagaacattttacaccggtggtggcttaatgaccttctacctgtggagaattttgtacctgagcatgattctgtctgccagatcgagactgaaggtctttttcgactggattaaattagcatttttcaaaagggactttttcaagggattatga

SEQ ID NO: 828 - DNA, 1542 bp, Artificial Sequence
  source: /note="Description of Artificial Sequence: Synthetic polynucleotide"
atgctatcgaagaacttgtacagcaacaagaggttgctgacctcgaccaacacgctagtcagattcgctagcaccagatccaccggggtggaaaactccggagcaggtcccacatctttcaagaccatgaaagtcattgaccctcagcacagcgacaaaccaaacgtgctgatactgggttcgggctggggagctatttcgtttttaaagcacattgacaccaagaagtacaacgttagcatcatctctcctagaagctacttcctgtttacgcccctgctgccttctgcccctgtggggacagtggacgaaaagtccattattgagcccatcgtgaattttgctctcaagaaaaaggggaacgttacctactatgaggcagaagccaccagcatcaatcccgacaggaacaccgttaccataaaatcattatctgccgttagccagctataccaacctgagaaccatctagggctgcatcaagcagaacccgctgagattaagtacgattatttaatcagtgctgtgggtgcggagcctaacacctttggaatccctggggtcactgattacggtcacttcctgaaggagattcccaactctctggaaatcagaagaactttcgccgccaatctggaaaaggctaacttactgccaaagggtgatcccgagagaagaagactgctgtccattgtggtcgttggcggtgggcctactggcgtagaggccgctggcgagctacaggattatgtgcaccaggacctgagaaagttcctccctgccctggccgaggaagtccaaattcacttggtggaagccctgcccatcgtgttgaacatgtttgagaaaaagctgtcatcatacgcgcaatcacatctggaaaacacttccatcaaggtacacctgagaacggctgtcgccaaagttgaagagaagcaactgttggccaagacgaagcacgaagacggtaagattaccgaggaaactattccatacggtactctgatttgggccaccggtaacaaggccagacccgtaatcacagaccttttcaagaagattcctgagcaaaactcgtccaagagaggattggcagtgaatgactttctgcaagtgaaaggcagcaacaacattttcgccattggtgacaacgcctttgctgggttgccaccaaccgcccaggtggcgcaccaagaggccgaatatttggccaagaacttcgacaaaatggctcaaatcccaaatttccagaagaacctatcttcaagaaaggataaaatcgatctgttgttcgaggagaacaacttcaaacccttcaagtacaacgatttaggcgccttagcatacctgggatccgaaagggccattgcaaccataagatccggtaagagaaccttttacaccggtggtggcttaatgaccttctacttatggagaattttgtacttgtccatgattctgtctgcaagatcgagattaaaggtctttttcgactggattaagctggcctttttcaaaagggacttctttaaaggcttatag

SEQ ID NO: 829 - DNA, 1542 bp, Artificial Sequence
  source: /note="Description of Artificial Sequence: Synthetic polynucleotide"
atgctatcgaagaatttgtatagtaacaagaggttgctcaccagcacgaataccctagtccgcttcgcttccaccagatccacaggggtcgaaaactccggagcaggtcccacaagctttaagaccatgaaggtcattgaccctcagcacagcgacaaaccaaacgtgctgatcctgggttcggggtggggagctatctcgtttctgaagcacattgacaccaagaagtacaacgtctccatcatcagccccagaagctatttcttattcacgcccttgttaccttctgcccctgttgggacagtagacgaaaagtcaattattgagcccatcgttaattttgctctgaagaaaaaggggaacgttacctactatgaggcagaagccaccagcatcaatcccgacaggaacaccgttaccataaaaagcctgagcgccgttagccagctataccaacctgaaaaccacctagggctgcaccaagcagaacctgctgagattaagtacgattatttaatcagcgctgtgggcgccgagcctaacacatttggaattcctggcgtcactgactacggccatttcctgaaagagatccccaactctttggaaatcagaagaacttttgccgccaacctagagaaggccaacctgttgccaaagggcgatcccgaaagaagaagactgctgtccatcgtcgtggttggcggtgggcctactggtgtagaggccgctggtgaactacaggactacgtgcaccaggacctgcggaagtttctgcctgccttggccgaggaagtccaaattcacttggtcgaagctctgcccatcgttctgaacatgtttgagaaaaagctttcatcatacgcgcaatcacacttagaaaacacctcgatcaaggtacacctgagaacggccgtcgccaaagttgaagagaagcagttgctggcaaagaccaaacacgaagacggcaaaataaccgaagaaactattccatacggtactttgatttgggccacgggtaacaaggcaagacccgtaatcacagaccttttcaagaaaattcccgagcagaactcgtccaagagaggactggcagtgaatgactttctgcaggtgaaaggcagcaacaacatcttcgccattggcgacaacgcatttgctgggctgccaccaaccgcccaggtggcccaccaagaggccgaatacttggccaagaatttcgataagatggctcagataccaaatttccaaaagaatctatcttcaagaaaggataaaattgatctcctgttcgaggagaacaacttcaaacccttcaaatacaacgatttaggtgccttagcatacctgggatccgaaagagccattgcaaccatacgttccggcaagagaaccttttacaccggtggaggcctgatgaccttctacttatggagaatcttgtacttgtccatgattctgtctgcaagatcgagattaaaggtgttcttcgactggatcaagctggcctttttcaaaagagacttcttcaagggattatag

SEQ ID NO: 830 - DNA, 1542 bp, Artificial Sequence
  source: /note="Description of Artificial Sequence: Synthetic polynucleotide"
atgctatcgaagaacttgtacagtaacaagaggttgctgacctcgaccaatacgctagtccgcttcgcttccaccagatccacaggcgtcgaaaactccggagctggtcctacctctttcaagaccatgaaagtcattgaccctcagcacagcgacaaaccaaacgtgctgatactgggttcggggtggggcgctatttcgtttctgaagcacattgacaccaagaagtacaacgtttccatcatctctcctagaagctatttcttattcacgcctctgttaccttctgccccagttgggacagtagacgaaaagtccatcattgagcccatcgttaatttcgctctcaagaaaaaggggaacgttacctactacgaggcagaagccacctctatcaatcccgacaggaacaccgttaccataaaatcattatctgccgtgagccagctgtaccaacctgaaaaccatctaggcctgcaccaggccgagcccgctgaaattaagtacgattatctgatcagtgctgtgggcgcggaacctaacacctttggaattcctggcgtcactgattacggccatttcctgaaggaaatccccaactctttggaaatccggagaacttttgccgccaatctagagaaggccaacctgttgccaaagggcgatcccgaacggagaaggctactgtccattgtggtcgtgggcggtgggcctactggtgtggaggccgctggtgaactgcaggattatgttcaccaggacctgcggaagttcctccctgcattggccgaagaagtccagattcacttggtggaagctctgcccatcgttttgaacatgtttgagaagaagcttagctcatacgcccaatcacacttagaaaacacttcgatcaaagtgcatctgagaacggctgtcgccaaggttgaagaaaagcaattgttggccaagaccaagcacgaagacggtaaaataaccgaggaaactattccatacggtactttgatttgggccacgggtaacaaggcaagacccgtaatcacagacctgttcaagaagatccctgagcaaaactcgtccaagagaggcctggcagtgaatgactttctgcaggtgaaaggcagcaacaacattttcgccatcggtgacaacgcatttgccgggttgccaccaaccgcccaggtggcgcaccaagaagccgaatacctggccaagaatttcgataagatggcccaaatcccaaatttccaaaagaatctatcttcaagaaaggataagattgatctcttgttcgaggagaacaactttaaacctttcaagtacaacgatttaggcgccttagcatacctgggatccgaaagggccattgcaaccataagaagcggtaagcggacattttacaccggcggaggcttaatgaccttctacttatggagaatcttgtacctgagcatgattctgtctgcacgctcgagattaaaggtgtttttcgactggattaaattagcatttttcaagagagacttcttcaaaggattatag

SEQ ID NO: 831 - DNA, 1542 bp, Artificial Sequence
  source: /note="Description of Artificial Sequence: Synthetic polynucleotide"
atgctaagcaagaacctgtacagtaacaagaggctgctgacctcgacgaatacgctagtcagattcgcttccaccagatccaccggcgtggaaaacagcggagcaggtcccacctctttcaagaccatgaaagtcattgaccctcagcacagcgacaaaccaaacgtgctgatactgggttcggggtggggagctatttcgtttttaaagcacattgacaccaagaagtacaacgtctccatcatcagccccagaagctatttcttatttacgcccctgttacctagcgcccctgttgggacagtggacgaaaagtcaattattgagcccatcgttaattttgctctcaagaaaaagggcaacgttacctactatgaggcagaagccacctctatcaaccccgacaggaataccgttaccataaaatcattaagcgccgtttcccagctgtaccaacctgaaaaccatctaggcctgcatcaagccgaacctgccgaaattaagtacgattatctgatcagtgctgtgggtgcggagcccaacacatttggtattcctggggtcactgactacggtcatttcctgaaggaaattcccaactctttggaaataagaagaacttttgccgccaatctggaaaaggccaacctgttgcctaagggcgatcccgagagaagaagactgctgtccattgtcgtcgtgggtggtgggcccactggtgtagaggctgctggtgaactacaggattacgttcaccaggacctgcggaagtttctgcctgccctggccgaagaagtccagattcacctggtggaagctctgcccatcgttctgaacatgtttgagaaaaagctttcatcatacgcccaatcacacttagaaaacacttccatcaaagtgcatctgagaacggctgtggccaaggtggaagaaaagcaactgttggcaaagaccaagcacgaggacggtaaaattaccgaagaaactattccatacggtactttgatttgggccacgggtaacaaggccagacccgtaatcacagaccttttcaagaaaattcctgagcaaaactcgtccaagagaggactggccgtgaatgacttcctgcaagtgaaaggcagcaacaacatcttcgccattggtgacaacgcctttgctgggctgccacctaccgcccaagtggcccaccaagaggccgagtatttggccaagaactttgataaaatggcccagataccaaatttccagaagaatctatcctcaagaaaggataaaattgatctcttgttcgaggagaacaactttaaacctttcaaatacaacgatttaggtgccttagcatacctgggcagcgaaagggccattgcaaccatccgttccggcaagagaacattttacaccggcggtggcctgatgaccttctacttatggagaattttgtacctgtccatgattctgtctgcaagaagcagactgaaggtgtttttcgactggatcaaattagcattcttcaaaagggacttttttaaaggattatag

SEQ ID NO: 832 - DNA, 1542 bp, Artificial Sequence
  source: /note="Description of Artificial Sequence: Synthetic polynucleotide"
atgctgtcgaagaatttgtatagcaacaagaggttgctcaccagcacgaatacgctcgtcagattcgcttccaccagatccaccggggtcgaaaacagcggagcaggccctacatcttttaagaccatgaaagtcatcgaccctcagcacagcgacaagccaaacgtgctgatactgggttcggggtggggagctatttcgtttttaaagcacattgacaccaagaagtacaacgtctccatcatctctcccagaagctatttcttatttacgcccttgttaccttctgcaccagttgggacagtagacgaaaagtcaattatcgagcccatcgtgaattttgctctcaagaaaaaggggaacgtcacctactatgaggcagaggccaccagcatcaaccccgacaggaataccgttaccataaaaagcttaagcgccgtgagccagctataccagcctgaaaaccatctagggctgcatcaagcagaacccgccgaaattaagtacgattacctgatcagcgctgtaggtgcggaacctaacacatttggtattcctggcgtcactgattacggccatttcctgaaggaaatccccaactctctggaaataagaagaactttcgccgccaatctggagaaggctaacttattgccaaagggtgatcccgaacggagaagactactgtccattgtcgtggttggcggtgggcccactggtgtagaagccgctggcgaactacaggattatgtgcaccaggacctgagaaagtttctccctgcattggccgaagaagtccaaattcacttggtcgaagctctgcccatcgtgctgaacatgtttgagaagaagcttagcagctacgcgcaatcacatttagaaaacacctcgatcaaagtacatctgagaaccgctgtcgccaaggtggaagaaaagcaactgttggcaaagacgaagcacgaggacggtaaaataaccgaggaaactatcccatacggtactttgatttgggccacgggtaacaaggccagaccggtaatcacagacctgttcaagaaaattcctgagcaaaacagctccaagcggggattggcagtgaacgactttctgcaagtgaaaggcagcaacaacattttcgccatcggcgacaacgcctttgccgggctgccacctaccgcccaagtggcccaccaggaggccgagtatttggccaagaattttgataaaatggcccaaatccccaatttccagaagaatctgtcttcaagaaaggataagattgatctgttgttcgaggagaacaactttaagcctttcaagtacaacgacttaggtgccttagcctacctgggatccgaaagagccattgccaccatacgttccggtaagcggaccttctacaccggtggtggcctgatgaccttctacttatggcggattctgtacttgagcatgattctgagcgcccgctcgagactgaaggtgtttttcgactggattaaattagcatttttcaagagggacttctttaaaggattatag

SEQ ID NO: 833 - DNA, 1542 bp, Artificial Sequence
  source: /note="Description of Artificial Sequence: Synthetic polynucleotide"
atgctgagcaagaacttgtatagtaacaagaggctgctcacctcgacgaataccctagtcagattcgctagcaccagatccaccggggtggaaaactccggagcaggtcccacctcttttaagaccatgaaagtcattgacccccagcacagcgacaagcccaacgtgctgatactgggctcggggtggggagctatctcgtttctgaagcacatcgacaccaagaagtacaacgtctccatcatctctcctagaagctatttcttatttacgcctctgttacctagcgcaccagttgggacagtggacgaaaagtcaatcatcgagcccatcgttaattttgctctgaagaaaaaggggaacgtcacctactatgaggcagaggccacctctatcaatcccgacaggaataccgttaccataaaatcattatctgccgttagccagctataccagcctgagaaccatctggggctgcatcaagccgagcctgctgaaattaagtacgattacttaatcagtgctgtaggcgccgagcccaacacatttggtattcctggggtgactgattacggtcatttcctgaaggagattcccaactctttggaaataagaagaaccttcgccgccaatctagaaaaggccaacttactgccaaagggtgatcccgagagaagaaggctactgtccattgtcgtcgttggtggtgggcccacaggtgtagaagctgctggtgaactacaggattatgttcaccaggacctgagaaagtttctgcctgcattggccgaagaagtccagattcacctggtcgaagccctgcccatcgtgttgaatatgttcgagaaaaagctttcaagctacgcgcaatcacatttagaaaacacctccatcaaggtgcatctgagaacggctgtcgccaaagttgaagagaagcaattgctggcaaagacgaaacacgaagacggtaaaataaccgaagaaactatcccatacggtactttgatttgggccaccggtaacaaggcaagaccggtaatcacagaccttttcaagaaaattcctgagcaaaactcgagcaagagaggattggcagtgaatgactttttgcaggtcaaaggcagcaacaacattttcgccatcggtgacaatgcctttgctggcttgccaccaacagcccaggtggcccaccaagaagccgaatatttggccaagaatttcgataaaatggctcagatacccaatttccaaaagaatctatcttcccggaaggataaaatcgatctcctgttcgaggagaacaacttcaaacctttcaaatacaacgacctgggtgccctggcatacctgggaagcgaaagggccattgcaaccatccgttccggtaagcggaccttctacaccggcggaggcttaatgaccttctacttatggagaattttgtacttgagcatgattctatctgcacgctcgagactgaaggtctttttcgactggattaaattagcctttttcaagagagacttcttcaaaggattatga

SEQ ID NO: 834 - DNA, 1542 bp, Artificial Sequence
  source: /note="Description of Artificial Sequence: Synthetic polynucleotide"
atgctgagcaagaatttgtacagtaacaagaggttgctcacctcgacgaacacgctagtcagattcgcctccaccagatccaccggcgtcgaaaactccggggcaggccctacatcttttaagaccatgaaggtcatcgaccctcagcacagcgacaaacccaacgtgctgatcctgggttcggggtggggagctatctcgtttctgaagcacattgacaccaagaagtacaacgtttccatcatctctcccagaagctatttcttattcacccccctgctgccttctgcaccagttgggacagtagacgaaaagtcaattattgagcccatcgttaatttcgctctcaagaaaaagggcaacgttacctactatgaggccgaggccacctctatcaatcccgacaggaataccgttaccataaaaagcttatctgccgtttcccagctgtaccaacccgaaaaccacctagggctgcatcaagccgaacctgctgaaattaagtacgattatctgatcagtgccgtaggcgccgagcctaacacatttggaattcctggggtcactgattacggtcacttcctgaaggaaattcccaactctttggaaataagaagaaccttcgccgccaatctagagaaggctaacttactgccaaagggcgatcccgagagaagaagactactgtccatcgtcgtggttggcggtgggcctactggtgtagaggccgctggcgagctacaggactatgttcaccaggacctgcggaagtttctccccgccctggccgaagaagtccagattcacttggtcgaagctctgcccatcgtgttgaatatgtttgagaaaaagcttagctcatacgcgcagagccacttagaaaacacttccatcaaggtacatctgagaacggccgtcgccaaagttgaagaaaagcagctgttggcaaagacgaaacacgaagacggtaaaataaccgaagaaaccatcccctacggtactttgatttgggccacgggtaacaaggcaagaccggtaatcacagaccttttcaagaaaattcctgagcaaaactcgtccaagcggggactggcagtgaacgactttctgcaggtgaaaggcagcaacaacattttcgccattggtgacaacgcatttgctgggttgccaccaaccgcccaggtggcgcaccaagaggccgagtatttggccaagaatttcgataagatggcccaaataccaaatttccagaagaacctgtcttcaagaaaggataaaattgatctgttgttcgaggagaacaacttcaagcctttcaaatacaacgatctgggtgccttagcatacctgggctccgaaagggccattgccaccatcagaagcggcaagcggaccttctacaccggtggaggcttaatgaccttctacttatggagaattttgtacctgtccatgattctaagcgcaagatcgagactgaaggtgtttttcgactggattaaactggcatttttcaaaagagacttttttaaaggattatag

SEQ ID NO: 835 - DNA, 1542 bp, Artificial Sequence
  source: /note="Description of Artificial Sequence: Synthetic polynucleotide"
atgctaagcaagaatttgtatagcaacaagcggctgctcacctcgacgaatacgctcgtcagattcgcctccaccagatccacaggcgtcgaaaactccggagctggccctacatcttttaagaccatgaaagtcattgaccctcagcacagcgacaaacccaacgtgctgatactgggttctgggtggggagctatcagctttctgaagcacattgacaccaagaagtacaacgtctccatcatctctcctagaagctatttcttatacacccctttgttacccagcgcaccagttggaaccgtagacgagaagtcaattatcgagcccatcgtgaattttgccctgaagaaaaaggggaacgttacctactacgaggccgaagccacctctatcaaccccgacaggaataccgttaccatcaaaagcttaagcgccgttagccagctataccaacctgagaaccatctagggctgcatcaagcagaacccgctgaaattaagtacgattatttaatcagcgctgtaggtgcggagcctaacacctttggaattcccggcgtcactgattacggtcacttcctgaaggaaattcccaactctttggaaatcagaagaacttttgccgccaatctagaaaaggctaacttactgccaaagggtgatcccgagagaagaagactactgtccattgtcgtcgttggcggagggcccacaggtgtggaagccgctggcgaactacaggattatgttcaccaggacctgagaaagtttctgcccgccctggccgaggaagtccaaattcacttggtcgaagctctgcccatcgttttgaatatgtttgagaaaaagctgtcatcatacgcgcagagccatctggaaaacacttcgatcaaagtacatctgagaaccgctgtcgccaaggttgaagaaaagcaactgctggcaaagacgaaacacgaagacggtaaaataaccgaagaaaccattccatacggtaccctgatttgggccacgggtaacaaggcaagaccggtaatcacagaccttttcaagaaaattcctgagcaaaactcgtccaagcggggcctggcagtgaacgactttttgcaagtgaaaggcagcaacaacattttcgccattggcgacaatgcatttgctgggttgccaccaaccgcccaggtggcgcaccaagaggccgagtatttggccaagaattttgataagatggcccaaatacccaatttccagaagaacctatcttcaagaaaggataaaattgatctcttgttcgaggaaaacaactttaagcccttcaaatacaacgatttaggtgccttagcatacctgggctccgaaagggccattgcaaccatcagatccggtaagcggaccttttacaccggtggaggcttaatgaccttctacttatggagaatcctgtacctgtccatgattctatctgccagatcgagactgaaggtctttttcgactggattaaattagcctttttcaaaagagacttctttaagggattatga

SEQ ID NO: 836 - DNA, 1542 bp, Artificial Sequence
  source: /note="Description of Artificial Sequence: Synthetic polynucleotide"
atgctatcgaagaatttgtatagtaacaagaggctgctcaccagcaccaatacgctagtgagattcgcttccaccagatccacaggggtggaaaactccggagcaggtcccacctcttttaagaccatgaaagtcattgaccctcagcacagcgacaagcccaacgtgctgatcctgggttcgggctggggcgctattagctttttaaagcacatcgacaccaagaagtacaacgtttccatcgtgagccctagaagctatttcctgtttacgcccttgttaccttctgccccagttgggacagtagacgaaaagtcaattattgagcccatcgttaattttgctctgaagaaaaagggcaacgttacctactatgaggcagaggccaccagcatcaatcccgacaggaataccgtgaccataaagtcattatctgccgtttcccagctataccaacctgaaaaccacctaggcctgcatcaagcagaacctgctgagattaagtacgactatttaatcagtgccgtaggcgcggaacctaacacatttggtatccctggggtgaccgattacggtcacttcctgaaggaaatccccaactctttggaaatacggagaactttcgccgccaacctggagaaggctaacttattgccaaagggtgaccccgaaagaagaaggctgctgtccatcgtcgtggtgggtggtggccctacaggtgtggaggctgctggtgaactgcaggattatgttcaccaggacctgcggaagtttctccctgcattggccgaagaagtccaaattcacttggtcgaagccctgcccatcgttttgaatatgttcgagaaaaagctttcatcatacgcgcaatcacatctggaaaacacttcgatcaaagtacatctgagaacggctgtggccaaggttgaagaaaagcaattgttggccaagacgaaacacgaggacggtaagataaccgaggaaactatcccctacggtaccttgatttgggccacgggtaacaaggcaagacccgtaatcacagaccttttcaagaaaattcctgagcagaacagctccaagagaggcctggccgtgaatgactttctgcaagtgaaaggcagcaacaacattttcgccattggcgacaatgcatttgctgggctgccaccaacagcccaggtggcccaccaagaggccgaatatttggccaagaattttgataaaatggctcaaataccaaatttccaaaagaatctgtcctcacggaaggataaaattgatctcctgttcgaggagaacaacttcaaacctttcaaatacaacgatttaggtgccctggcctacctgggcagcgaaagagccattgcaaccatacgtagcggcaagagaacattctacaccggcggtggcctgatgaccttctacttatggcggattttgtacttgtccatgattctgtctgcccgctcgagattaaaggtctttttcgactggattaaactggccttcttcaaaagagacttctttaaaggcctgtga

SEQ ID NO: 837 - DNA, 1542 bp, Artificial Sequence
  source: /note="Description of Artificial Sequence: Synthetic polynucleotide"
atgctatcgaagaacctgtatagtaacaagaggctgctcaccagcacgaatacgctagtcagattcgcttccaccagatccaccggcgtcgaaaacagcggagcaggtcccaccagctttaagaccatgaaaatcatcgaccctcagcacagcgacaaaccaaacgtgctgatcctgggctcggggtggggagctatctcgtttttaaagcacatcgacaccaagaagtacaacgttagcatcatctctcctagaagctatttcttattcacgcctttgttaccctctgcaccagttgggaccgtagacgaaaagtccattattgagcccatcgtgaattttgctctcaagaaaaagggcaacgtcacctactacgaggcagaggccacctctatcaatcccgacaggaataccgttaccatcaaaagcttatctgccgttagccagctataccagcctgaaaaccacctagggctgcatcaagcagagcctgccgaaattaagtacgattatttaatcagtgccgtgggtgcggaacctaacacatttggtattcctggggtgactgattacggtcatttcctgaaagaaattcccaacagcctggaaatcagaagaacttttgccgccaatctggaaaaggctaacttattgccaaagggcgatcccgaaagaagaaggctactgagcattgtcgtggttggtggagggcctacaggtgtagaggccgctggcgaactgcaggattatgttcaccaggacctgagaaagtttctccctgcactggccgaggaagtccagattcacctggtcgaagctctgcccatcgttctgaatatgttcgagaaaaagctttcatcatacgcgcaaagccatttagaaaacacttccatcaaggtgcacctgagaaccgctgtcgccaaggttgaagagaagcaattgttggcaaagaccaaacacgaagacggtaagataaccgaagaaactattccatacggtactttgatttgggccacgggtaacaaggcaagaccggtgatcacagacctgttcaagaaaattcctgagcagaacagctccaagagaggattggccgtgaatgactttttgcaagtcaaaggcagcaacaacattttcgccattggcgacaatgcctttgccgggttgccacctaccgcccaggtggcgcaccaagaagccgaatatttggccaagaatttcgacaaaatggcccagatccccaatttccaaaagaatctatcttcaagaaaggataaaattgacctcctgttcgaggagaacaacttcaagcctttcaaatacaacgacttaggtgccctggcatacctgggcagcgaaagagccattgccaccatacgttccggcaagagaacattctacaccggtggtggcctgatgaccttctacttatggagaattctgtacttgtccatgatcctatctgcaagatcgagattaaaggtctttttcgactggattaaattagcctttttcaaaagagacttttttaaaggcttatga

SEQ ID NO: 838 - DNA, 1542 bp, Artificial Sequence
  source: /note="Description of Artificial Sequence: Synthetic polynucleotide"
atgctatcgaagaacttgtatagtaacaagcggttgctcacctcgaccaatacgctcgtcagattcgcttccaccagatccacaggggtggaaaactccggagctggtcctacatctttcaagaccatgaaagtcatcgaccctcagcacagcgacaagccaaacgtgctgatactgggctcgggctggggagctatctcgtttttaaagcacattgacaccaagaagtacaacgtctccatcatctctcctagaagctatttcttatttacccccttgttaccttctgccccagttggaaccgtagacgaaaagtcaattattgagcccatcgttaacttcgccctcaagaaaaagggcaacgttacctactacgaggcagaagccacctctatcaaccccgacaggaacaccgttaccataaaatcattatctgccgttagccagctataccaacctgagaaccatctagggctgcatcaagcagagcccgctgaaattaagtacgattacctgatcagcgccgtaggtgccgaacccaacacatttggtattcctggcgtgactgattacggtcatttcctgaaagagattcccaacagcttggaaataagacggacttttgccgccaatctagaaaaggctaacctgttgccaaagggtgaccccgaaagaagaagactactgtccattgtcgtggttggcggtgggcctacaggcgtggaggccgctggtgaactgcaggattacgtgcaccaggacctgcggaagtttctgcctgccttggccgaagaagtccaaattcacttggtcgaagctctgcccatcgttttgaacatgtttgagaaaaagctttcatcatacgcgcaatcacatttagaaaacacttcgatcaaggtacatctgagaacggccgtcgccaaagtggaagaaaagcaattgttggcaaagacgaaacacgaagacggtaagattaccgaggaaactattccatacggtactctgatttgggccacgggtaacaaggccagacccgtgatcacagaccttttcaagaaaattcctgagcagaacagcagcaagcggggcctggcagtgaatgactttctgcaggtgaaaggcagcaacaacattttcgccattggtgacaacgcctttgctggcttgccaccaaccgcccaggtggcgcaccaagaggccgaatatctggccaagaacttcgacaaaatggctcaaatcccaaatttccaaaagaatctatcctccagaaaggataaaattgatctcctgttcgaggagaacaactttaaacctttcaagtacaacgatctgggtgccttagcatacctgggaagcgaaagagccattgcaaccatccgttccggtaagagaacattttacaccggcggtggcctgatgaccttctacctgtggagaattatctacttgtccatgatcctatctgcaagaagcagactgaaggtgtttttcgactggattaaactggcatttttcaaaagagacttctttaagggcctgtag

SEQ ID NO: 839 - DNA, 1542 bp, Artificial Sequence
  source: /note="Description of Artificial Sequence: Synthetic polynucleotide"
atgctgtcgaagaatctgtatagtaacaagaggttgctcaccagcacgaatacgctcgtccgcttcgcttccaccagatccacaggggtcgaaaactccggagctggccctacaagctttaagaccatgaaagtcattgaccctcagcacagcgacaaaccaaacgtgctgatactgggttcgggctggggagctatttcgtttctgaagcacattgacaccaagaagtacaacgttagcatcatctctcccagaagctatttcatcttcacccctttgttaccttctgcacctgttgggacagtagacgaaaagtcaattattgagcccatcgttaattttgctctgaagaaaaaggggaacgttacctactatgaggccgaagccacctctatcaatcccgacaggaacaccgttaccataaaatcactgagcgccgtttcccagctgtaccagcctgaaaaccatctggggctgcatcaggccgaacccgctgaaattaagtacgattatttaatcagcgccgtaggcgccgaacccaacacatttggtattcctggcgtcaccgattacggtcatttcctgaaggagattcccaacagcctggaaataagaagaacttttgccgccaacctagaaaaggccaacttattgccaaagggcgaccccgaaagaagaaggctactgtccattgtcgtggtgggtggagggcccactggtgtggaagccgctggcgagctgcaggattacgttcaccaggacctgcggaagtttctgcctgcattggccgaagaagtccagattcacttggtggaagccctgcccatcgttttgaatatgtttgagaaaaagctgtcaagctacgcgcaatcacatttagaaaacacttcgatcaaagtacatctgagaacggctgtggccaaagtggaagaaaagcaattgttggccaagacgaaacacgaagacggtaagataaccgaggaaactattccatacggcactttgatttgggccaccggtaacaaggccagaccggtaatcacagaccttttcaagaagattcccgagcagaactcgtccaagcggggcttggcagtgaatgactttctgcaagtgaaaggcagcaacaacattttcgccattggtgacaatgcatttgctgggttgccaccaaccgcccaggtggcgcaccaagaggccgagtacctggccaagaattttgataagatggctcagatcccaaatttccagaagaatctgtcttcccggaaggataagattgatctcttgttcgaggaaaacaactttaagcctttcaaatacaacgacttaggcgccttagcatacctgggaagcgaaagggccattgcaaccatacgttccggtaagagaacattttacaccggtggaggcttaatgaccttctacttatggagaattttgtacctgagcatgatcctatctgcacgcagcagactgaaggtctttttcgactggattaaattagcatttttcaaaagagactttttcaagggattatag

SEQ ID NO: 840 - DNA, 1542 bp, Artificial Sequence
  source: /note="Description of Artificial Sequence: Synthetic polynucleotide"
atgctatcgaagaatctgtatagcaacaagaggttgctcacctcgaccaatacgctagtccgcttcgcttccaccagatccacaggcgtggaaaactccggggctggtcctacatcttttaagaccatgaaagtcattgacccccagcacagcgacaaacccaacgtgctgatactgggttctggctggggagctattagctttttaaagcacattgacaccaagaagtacaacgtttccatcatctctcctagaagctatttcttatacacgcctttgttaccctctgcacctgtggggacagtagacgagaagtcaattattgagcccatcgttaattttgctctgaagaaaaaggggaacgttacctactacgaggcagaagccacctctatcaatcccgaccggaacaccgttaccataaagtcactgtctgccgtttcccagctataccaacctgaaaaccacctaggcctgcaccaagcagaacctgctgaaattaagtacgactacctgatcagtgctgtaggtgcggaacctaacacatttggaattcctggcgtcactgattacggtcatttcctgaaggaaatccccaactctctggaaataagaagaaccttcgccgccaacctagagaaggccaacttactgccaaagggtgatcccgaacggagaaggctactgtccattgtcgtcgtgggcggaggccctactggtgtagaggctgctggtgaactgcaggactacgtgcaccaggacctgagaaagttcctccctgccttggccgaagaagtccaaattcacctggtcgaagctctgcccatcgtgttgaatatgttcgagaaaaagctttcatcatacgcgcagagccatttagaaaacacttcgatcaaagtgcatctgagaaccgctgtcgccaaagttgaagagaagcagttgctggcaaagaccaagcacgaagacggtaaaataaccgaggaaaccattccatacggcactttgatttgggccaccggtaacaaggcaagacccgtaatcacagaccttttcaagaagattcctgagcagaactcgtccaagagaggattggccgtgaacgactttttgcaggtcaaaggcagcaacaacatcttcgccatcggcgacaatgcatttgctgggttgccaccaaccgcccaagtggcgcaccaagaggccgagtacttggccaagaattttgataaaatggctcaaataccaaatttccagaagaatctatcttcaagaaaggataaaatcgatctcttgttcgaggagaacaactttaaacccttcaaatacaacgatctgggcgccttagcatacctgggatccgaaagagccattgccaccatccgtagcggcaagagaacattctacaccggtggaggcttaatgaccttctacctgtggagaattctgtacttgtccatgatcctatctgcaagatcgagattaaaggtcttcttcgactggattaaattagcctttttcaagagagacttttttaaaggcttatga

SEQ ID NO: 841 - DNA, 1542 bp, Artificial Sequence
  source: /note="Description of Artificial Sequence: Synthetic polynucleotide"
atgctatcgaagaatctgtatagtaacaagaggttgctcacctcgaccaatacgctagtgagattcgcttccaccagatccacaggggtggaaaacagcggagcaggtcccacatcttttaagaccatgaaaatcattgaccctcagcacagcgacaaacccaacgtgctgatactgggttctgggtggggcgctatttcgtttttaaagcacattgacaccaagaagtacaacgttagcatcatcagccccagaagctacttcttattcacgcccttgttacctagcgcaccagttgggaccgtagacgagaagtccattattgagcccatcgtgaatttcgctctcaagaaaaaggggaacgttacctactatgaggcagaggccacctctatcaaccccgaccggaataccgttaccataaagagcttatctgccgtgtcccagctataccaacctgagaaccatctagggctgcaccaagcagaacccgctgaaattaagtacgattatttaatcagtgctgtaggtgcggagcccaacacatttggtatccctggggtcaccgactacggtcatttcctgaaggaaatccccaacagcttggaaataagaagaacttttgccgccaacctagagaaggccaacctgttgccaaagggtgatcccgaaagaagaagactactgtccattgtcgtcgtgggtggaggccctactggtgtggaggctgctggcgaactgcaggactatgtgcaccaggacctgagaaagttcctccctgcactggccgaagaagtccaaattcacttggtcgaagctctgcccatcgttttgaatatgttcgagaaaaagcttagcagctacgcgcaatcacatttagaaaacacctcgatcaaagtgcatctgagaacggctgtcgccaaagttgaagagaagcagttgttggcaaagaccaaacacgaggacggtaaaataaccgaagaaactatcccctacggtactctgatttgggccacgggtaacaaggccagaccggtaatcaccgacctgttcaagaagattcctgagcagaactcgtccaagcggggactggcagtgaacgacttcttgcaagtgaaaggcagcaacaacattttcgccattggtgacaatgcatttgccgggctgccaccaaccgcccaagtggcccaccaggaggccgagtatttggccaagaattttgataaaatggcccaaataccaaatttccagaagaatctatcttcacggaaggataagattgatctcctgttcgaggagaacaacttcaaacctttcaaatacaacgatttaggtgccttagcatacctgggcagcgaaagggccattgcaaccatacgtagcggtaagcggacattctacaccggcggtggcttaatgaccttctacttatggagaatcctgtacttgtccatgatcctatctgcacgctcgagattaaaggtcttcttcgactggatcaaattagcatttttcaagagggacttcttcaaaggattatag

SEQ ID NO: 842 - DNA, 1542 bp, Artificial Sequence
  source: /note="Description of Artificial Sequence: Synthetic polynucleotide"
atgctatcgaagaatttgtatagcaacaagaggttgctcaccagcacgaataccctcgtcagattcgccagcaccagatccaccggcgtcgaaaactccggagcaggtcctacatcttttaagaccatgaaagtcattgacccccagcacagcgacaagccaaacgtgctgatcctgggttcggggtggggagctatttcgtttttaaagcacatcgacaccaagaagtacaacgtttccatcgtgtctcctagaagctatttcctgtttacgcctttgttaccctctgccccagttgggaccgtagacgaaaagtccattattgagcccatcgttaacttcgccctgaagaaaaagggcaacgttacctactatgaggcagaagccacctctatcaatcccgacaggaataccgttaccataaagtcattaagcgccgttagccagctataccagcccgaaaaccacctagggctgcaccaagcagaacctgctgaaattaagtacgactacttaatcagtgccgtgggtgcggaacctaacacctttggaattcctggggtgactgattacggtcatttcctgaaagaaatccccaacagcttggaaatccggcggacttttgccgccaacctagagaaggccaacttactgccaaagggtgatcccgagagaagaagactactgtccattgtcgtggttggtggagggcccactggcgtagaggccgctggtgaactacaggattatgtgcaccaggacctgcggaagtttctccctgcactggccgaagaagtccaaattcacctggtcgaagctctgcccatcgtgttgaatatgtttgagaaaaagctttcatcatacgcccaaagccacctggaaaacacctcgatcaaagtacatctgagaacggctgtggccaaggttgaagagaagcaattgctggccaagacgaagcacgaagacggtaaaattaccgaagaaaccattccatacggtactctgatttgggccacgggcaacaaggcaagaccggtgatcacagaccttttcaagaaaatccctgagcaaaactcgtccaagagaggattggcagtgaatgactttttgcaagtgaaaggcagcaacaacatcttcgccattggtgacaatgcctttgccgggttgcctccaacagcccaggtggcccaccaagaggccgagtatttggccaagaattttgataagatggcccaaatcccaaatttccagaagaatctatcttcaagaaaggataaaattgacctgctgttcgaggagaacaacttcaagcctttcaaatacaacgatttaggcgccttagcctacctgggaagcgaaagggccattgccaccatacgtagcggtaagagaacattctacaccggcggtggcttaatgaccttctacttatggcggattttgtacctgtccatgattctatctgcaagatcgagactgaaggtcttcttcgactggattaaattagcatttttcaaaagagactttttcaaaggattatag

SEQ ID NO: 843 - DNA, 1542 bp, Artificial Sequence
  source: /note="Description of Artificial Sequence: Synthetic polynucleotide"
atgctgagcaagaatctgtatagtaacaagaggttgctgacctcgacgaataccctagtcagattcgcttccaccagatccacaggggtggaaaactccggagcaggtcctacaagctttaagaccatgaaaatcatcgaccctcagcacagcgacaaaccaaacgtgctgatactgggttcggggtggggagctatttcgtttctgaagcacattgacaccaagaagtacaacgtttccatcatctctcccagaagctatttcctgttcacccctttgttacctagcgccccagttgggacagtagacgaaaagtcaattattgagcccatcgtgaatttcgctctgaagaaaaaggggaacgtcacctactatgaggcagaagccacctctatcaaccccgacaggaacaccgttaccatcaaaagcttaagcgccgtgagccagctataccaacctgaaaaccatctagggctgcatcaggccgaacctgctgaaattaagtacgattacctgatcagtgccgtgggtgccgagcccaacacatttggaattcccggggtgactgattacggtcatttcctgaaagaaatccccaactctttggaaataagaagaacctttgccgccaatctggagaaggccaacctgctgccaaagggtgatcccgaacggagaagactgctgtccattgtcgtcgttggtggtgggcctactggcgtagaggccgctggtgagctacaggactatgtgcaccaggacctgagaaagtttctgcctgccttggccgaagaagtccagattcacttggtcgaagccctgcccatcgttttgaacatgttcgagaaaaagctgtcaagctacgcccagtcacatctggaaaacacctcgatcaaggtacatctgagaacggccgtggccaaggtggaagagaagcaattgttggccaagacgaaacacgaagacggtaagattaccgaagaaaccattccctacggtactttgatttgggccacgggtaacaaggcaagaccggtaatcacagaccttttcaagaaaattcctgagcaaaactcgtccaagagaggcttggcagtgaatgactttttgcaagtgaaaggcagcaacaacattttcgccattggtgacaacgcctttgccgggttgccaccaacagcccaagtggcgcaccaagaggccgaatatttggccaagaattttgataaaatggctcaaataccaaatttccaaaagaatctatcctcacggaaggataaaattgatctcttgttcgaggaaaacaactttaaacccttcaaatacaacgatttaggtgccctggcctacctgggaagcgaaagggccattgccaccataagaagcggtaagagaacattttacaccggcggaggcttaatgaccttctacttatggagaattttgtacctgtccatgatcctatctgcacgcagcagattaaaggtctttttcgactggattaaattagccttcttcaaaagggacttctttaaaggcctgtag

SEQ ID NO: 844 - DNA, 1542 bp, Artificial Sequence
  source: /note="Description of Artificial Sequence: Synthetic polynucleotide"
atgctgtcgaagaacttgtacagtaacaagcggttgctcacctcgacgaacaccctcgtcagattcgccagcaccagatccaccggggtcgaaaactccggagcaggccctacatcttttaagaccatgaaaatcattgaccctcagcacagcgacaagccaaacgtgctgatactgggctctgggtggggagccattagctttctgaagcacattgacaccaagaagtacaacgtttccatcatcagccctagaagctatttcttatttacgcctttgttaccttctgcaccagttggaaccgtggacgaaaagtcaattatcgagcccatcgttaactttgctctgaagaaaaaggggaacgtcacctactatgaggcagaagccacctctatcaatcccgaccggaacaccgtgaccataaaaagcctgtctgccgttagccagctataccagcctgaaaaccacctggggctgcatcaagcagaacccgccgaaattaagtacgattatctgatcagtgctgtgggtgccgaacctaacacctttggtattcctggcgtcactgattacggtcatttcctgaaagagattcccaactctttggaaatcagaagaacttttgccgccaatctagagaaggctaacctgttgccaaagggcgaccccgaaagaagaaggctgctgtccatcgtcgtggttggtggtgggcccacaggtgtagaggccgctggcgaactacaggattatgtgcaccaggacctgagaaagttcctccctgccttggccgaagaagtccagattcacctggtcgaagccctgcccatcgtgttgaatatgtttgagaaaaagctttcatcatacgcgcagtcacatttagaaaacacttcgatcaaagtacatctgagaacggctgtggccaaggttgaagagaagcagttgttggcaaagacgaaacacgaagacggcaaaattaccgaagaaaccatcccctacggtaccttgatttgggccacgggtaacaaggcaagaccggtgatcacagaccttttcaagaagattcctgagcaaaactcgagcaagcggggattggccgtgaatgactttttgcaagtgaaaggcagcaacaacattttcgccattggtgacaatgcctttgccgggttgccaccaacagcccaagtggcccaccaggaagccgaatatttggccaagaattttgacaagatggctcaaataccaaatttccaaaagaatctatcttcaagaaaggataaaattgatctcttgttcgaggagaacaacttcaaacctttcaagtacaacgacctgggtgccctggcatacctgggatccgaaagggccattgcaaccataagatccggtaagagaacattttacaccggcggtggcttaatgaccttctacttatggagaattttgtacttgtccatgatcctgtctgcaagaagcagactgaaggtgttcttcgactggattaagttagcatttttcaaaagggactttttcaaaggattatag

SEQ ID NO: 845 - DNA, 1542 bp, Artificial Sequence
  source: /note="Description of Artificial Sequence: Synthetic polynucleotide"
atgctatcgaagaacttgtatagtaacaagaggttgctcaccagcacgaacacgctcgtcagattcgctagcaccagatccacaggcgtcgaaaacagcggagcaggtcctacatcttttaagaccatgaaagtcatcgacccccagcacagcgacaaaccaaacgtgctgatactgggttcggggtggggagccattagctttctgaagcacattgacaccaagaagtacaacgtttccatcatctctcccagaagctacttcatctacacccctctgttaccttctgcaccagtggggacagtggacgagaagtcaattattgagcccatcgtgaatttcgctctcaagaaaaagggcaacgttacctactatgaggcagaagccacctctatcaatcccgacaggaacaccgtgaccataaaaagcctgagcgccgtttcccagctataccagcctgagaaccacctagggctgcaccaagcagaacccgccgagattaagtacgattacttaatcagtgctgtaggtgcggaacccaacacctttggtattcctggggtcaccgattacggtcatttcctgaaggaaattcccaactctttggaaataagaagaactttcgccgccaacctggagaaggccaacttattgccaaagggtgatcccgagagaagaaggctgctgagcattgtggtcgtgggtggtggccccactggcgtagaagctgctggcgaactgcaggactatgttcaccaggacctgagaaagtttctccctgcattggccgaagaagtccaaattcacctggtcgaagctctgcccatcgttttgaacatgtttgagaaaaagctttcaagctacgcgcaatcacatttagaaaacacttcgatcaaagtgcatctgagaacggccgtcgccaaagttgaagaaaagcagttgttggcaaagacgaaacacgaggacggtaagattaccgaagaaaccatcccctacggtactctgatttgggccaccggtaacaaggcaagacccgtaatcaccgacctgttcaagaaaattcctgagcaaaactcgtccaagagaggcttggcagtgaatgactttttgcaggtgaaaggcagcaacaacatcttcgccattggtgacaatgcatttgctggcttgccaccaaccgcccaggtggcccaccaggaggccgaatacttggccaagaattttgataaaatggctcagataccaaatttccaaaagaatctatcctccagaaaggataaaatcgatctcttgttcgaggagaacaactttaaacctttcaaatacaacgatttaggtgccttagcctacctgggatccgaaagggccattgccaccatacgttccggtaagagaaccttctacaccggtggtggcctgatgaccttctacttatggagaattctgtacctgtccatgattctatctgccagatcgagactgaaggtctttttcgactggattaaattagcatttttcaaaagggacttttttaaaggcttatga

SEQ ID NO: 846 - DNA, 1542 bp, Artificial Sequence
  source: /note="Description of Artificial Sequence: Synthetic polynucleotide"
atgctatcgaagaatttgtatagtaacaagaggttgctcacctcgacgaacacgctagtcagattcgcttccaccagatccacaggggtggaaaactccggggcaggtcccacatctttcaagaccatgaaagtcatcgaccctcagcacagcgacaagccaaacgtgctgatactgggttcggggtggggagctatttcgtttttaaagcacattgacaccaagaagtacaacgttagcatcatctctcctagaagctatttcctgtacacgcccctgctgccttctgcacctgttgggaccgtagacgaaaagtccattattgagcccatcgttaattttgctctgaagaaaaaggggaacgttacctactacgaggcagaagccacctctatcaatcccgacaggaataccgttaccataaaatcattatctgccgttagccagctgtaccaacctgaaaaccatctagggctgcaccaggccgaacccgccgaaattaagtacgattatttaatcagtgctgtaggcgccgaacctaacacatttggtattcccggcgtgactgattacggtcatttcctgaaggaaattcccaacagcttggaaataagaagaactttcgccgccaatctggagaaggctaacttactgcctaagggtgaccccgaaagaagaaggctactgtccattgtcgtggtgggcggtggccctacaggtgtagaggctgctggcgaactgcaggactatgtgcaccaggacctgagaaagtttctgcctgccttggccgaggaaatccaaattcacttggtggaagccctgcccatcgttttgaatatgttcgagaaaaagctgagctcatacgcgcagtcacacttagaaaacacttccatcaaagtacacctgagaaccgccgtggccaaagttgaagaaaagcagttgttggcaaagacgaagcacgaagacggtaaaataaccgaagaaaccattccatacggcactctgatttgggccaccggtaacaaggcaagaccggtgatcaccgaccttttcaagaaaattcctgagcaaaactcgtccaagagaggcttggcagtgaatgactttctgcaagtgaaaggcagcaacaacatcttcgccatcggtgacaacgcatttgccgggctgccaccaaccgcccaagtggcgcaccaagaagccgaatatttggccaagaattttgacaagatggcccagatacccaatttccaaaagaacctatcttccagaaaggataaaatcgatctgttgttcgaggagaacaacttcaaacccttcaaatacaacgatctgggcgccttagcatacctgggaagcgaaagggccattgcaaccatacgtagcggtaagagaacattctacaccggtggtggcttaatgaccttctacttatggcggattttgtacctgtccatgattctgtctgcacgctcgagactgaaggtgtttttcgactggattaagctggcctttttcaaaagagacttctttaaaggattatag

SEQ ID NO: 847 - DNA, 1542 bp, Artificial Sequence
  source: /note="Description of Artificial Sequence: Synthetic polynucleotide"
atgctatcgaagaatctgtacagtaacaagaggttgctcacctcgacgaacacgctagtcagattcgctagcaccagatccacaggcgtcgaaaacagcggagcaggccccacaagctttaagaccatgaaaatcattgaccctcagcacagcgacaagccaaacgtgctgatactgggttcgggctggggcgccatttcgtttttaaagcacattgacaccaagaagtacaacgtctccatcatcagccctagaagctatttcctgtacacgcctttgttaccttctgcaccagtggggaccgtagacgaaaagtcaattatcgagcccatcgttaatttcgctctcaagaaaaagggcaacgtcacctactacgaggcagaagccacctctatcaatcccgaccggaataccgttaccatcaagagcctgtctgccgttagccagctgtaccaacctgagaaccacctggggctgcatcaggcagagcctgctgaaattaagtacgattatttaatcagcgctgtaggtgcggaacctaacacatttggtattcccggcgtcaccgattacggtcatttcctgaaggaaatccccaactctttggaaatcagaagaacctttgccgccaatctggagaaggctaacttattgccaaagggtgatcccgaaagaagaagactactgtccattgtcgtggttggtggaggccctactggtgtagaggccgctggcgaactgcaggactacgttcaccaggacctgcggaagttcctccccgcattggccgaagaagtccaaattcacctggtcgaagctctgcccatcgttttgaacatgttcgagaaaaagctgagctcatacgcgcaatcacatttagaaaacacttcgatcaaagtgcacctgagaacggccgtcgccaaagttgaagaaaagcaattgttggcaaagaccaagcacgaggacggcaagataaccgaggaaaccattccatacggtactttgatttgggccacgggtaacaaggccagacccgtgatcacagaccttttcaagaagattcctgagcaaaactcgtccaagagaggcttggcagtgaacgacttcttgcaggtcaaaggcagcaacaacatcttcgccatcggtgacaacgcatttgctgggttgccaccaacagcccaggtggcgcaccaagaggccgaatatttggccaagaactttgataaaatggcccaaatacccaatttccaaaagaacctatcttcaagaaaggataaaatcgatctcttgttcgaggagaacaacttcaagcctttcaaatacaacgatttaggcgccctggcatacctgggaagcgaaagggccattgcaaccatccgtagcggtaagagaacattctacaccggtggaggcttaatgaccttctacttatggagaattctgtacttgtccatgattctatctgccagatcgagactgaaggtctttttcgactggatcaaattagcatttttcaagagagacttttttaaaggattatag

SEQ ID NO: 848 - DNA, 1542 bp, Artificial Sequence
  source: /note="Description of Artificial Sequence: Synthetic polynucleotide"
atgctatcgaagaatttgtatagtaacaagaggttgctcacctcgaccaatacgctcgtgagattcgctagcaccagatccaccggggtggaaaactccggagcaggtcccacatctttcaagaccatgaaaatcattgaccctcagcacagcgacaaaccaaacgtgctgatactgggttcggggtggggcgctatctcgtttctgaagcacattgacaccaagaagtacaacgtttccatcatctctcctagaagctacttcttatttacccccttgctgccctctgcaccagttgggaccgtagacgaaaagtcaatcatcgagcccatcgttaattttgctctgaagaaaaaggggaacgttacctactacgaggccgaagccaccagcatcaaccccgaccggaataccgtgaccatcaaatcattaagcgccgttagccagctataccagcctgaaaaccatctgggcctgcatcaagccgagcctgctgaaattaagtacgattatttaatcagcgctgtaggtgcggaacctaacacatttggtattcccggcgtgactgactacggtcacttcctgaaggagattcccaacagcttggaaataagaagaacttttgccgccaatctggagaaggccaacttattgccaaagggtgatcccgaacggagaaggctgctgagcattgtcgtggttggtggagggcctacaggtgtagaggccgctggtgaactgcaggattatgttcaccaggacctgagaaagtttctccccgcattggccgaagaaatccaaattcacttggtggaagccctgcccatcgttttgaatatgtttgagaaaaagcttagctcatacgcccagtcacacctggaaaacacttcgatcaaagtacacctgagaaccgctgtcgccaaagttgaagaaaagcagttgttggcaaagacgaaacacgaagacggtaaaataaccgaagaaactatcccatacggtaccctgatttgggccacgggtaacaaggcaagaccggtaatcacagacctgttcaagaagattcctgagcagaactcgtccaagagaggactggcagtgaatgactttctgcaagtgaaaggcagcaacaacatcttcgccatcggtgacaacgcatttgctgggttgccaccaaccgcccaagtggcgcaccaggaggccgaatatttggccaagaattttgataaaatggcccagataccaaatttccaaaagaacctatcttcacggaaggataagatcgacctcttgttcgaggaaaacaactttaaacctttcaaatacaacgatttaggcgccttagcatacctgggctccgaaagggccattgcaaccatacgtagcggtaagcggaccttttacaccggcggtggcctgatgaccttctacttatggagaattctgtacttgtccatgatcctgtctgcccgctcgagactgaaggtgttcttcgactggattaaattagcctttttcaaaagagacttctttaagggcttatga

SEQ ID NO: 849 - DNA, 1542 bp, Artificial Sequence
  source: /note="Description of Artificial Sequence: Synthetic polynucleotide"
atgctatcgaagaatttgtatagtaacaagaggttgctgacctcgacgaacacgctagtcagattcgcttccaccagatccacaggggtggaaaacagcggggcaggccctacctcttttaagaccatgaaagtcatcgaccctcagcacagcgacaagcccaacgtgctgatactgggctctgggtggggagctattagctttttaaagcacattgacaccaagaagtacaacgtttccatcatcagccctagaagctacttcatcttcacgcctttgttaccctctgcacctgttgggacagtagacgaaaagtcaatcattgagcccatcgttaattttgccctcaagaaaaaggggaacgttacctactacgaggcagaggccacctctatcaaccccgaccggaataccgttaccataaagtcattaagcgccgtttcccagctataccagcctgaaaaccacctgggcctgcatcaggcagaacctgccgaaattaagtacgattacttaatcagcgctgtaggtgcggagcctaacacatttggtattcctggggtgactgattacggtcatttcctgaaagaaattcccaactctctggaaatacggcggactttcgccgccaacctagaaaaggccaacttattgcctaagggtgatcccgaaagaagaagactactgagcatcgtcgtggttggtggtgggcccacaggtgtagaagctgctggtgaactacaggattatgttcaccaggacctgagaaagttcctgcccgcattggccgaggaaatccaaattcacttggtggaagctctgcccatcgtgctgaatatgtttgagaagaagctgagcagctacgcgcaatcacatttagaaaacacttccatcaaagtacatctgagaacggctgtggccaaggttgaagaaaagcaattgttggcaaagaccaaacacgaagacggcaagataaccgaagaaactattccatacggtactttgatttgggccacgggcaacaaggccagaccggtaatcacagaccttttcaagaaaattcccgagcagaactcgagcaagcggggattggccgtgaatgactttttgcaagtgaaaggcagcaacaacatcttcgccattggtgacaatgcctttgctgggttgccaccaaccgcccaggtggcccaccaagaggccgagtatctggccaagaactttgacaaaatggctcaaatcccaaatttccaaaagaatctatcttcacggaaggataagattgatctcttgttcgaggagaacaactttaaacccttcaaatacaacgatctgggcgccttagcctacctgggctccgaaagggccattgccaccatacgttccggtaagagaacattctacaccggtggtggcttaatgaccttctacctgtggcggattttgtacttgtccatgattctatctgcccgctcgagactgaaggtctttttcgactggattaaattagcatttttcaagagggacttttttaaaggattatag

SEQ ID NO: 850 - DNA, 1542 bp, Artificial Sequence
  source: /note="Description of Artificial Sequence: Synthetic polynucleotide"
atgctatcgaagaatttgtatagcaacaagaggttgctcacctcgacgaataccctagtccgcttcgccagcaccagatccaccggggtggaaaacagcggagctggtcctacatcttttaagaccatgaaaatcattgaccctcagcacagcgacaaacccaacgtgctgatactgggctcggggtggggcgctatttcgtttctgaagcacattgacaccaagaagtacaacgtttccatcatctctcctagaagctatttcttatacacgcctttgttaccctctgcaccagtggggaccgtagacgaaaagtccattattgagcccatcgtgaatttcgctctcaagaaaaaggggaacgtcacctactacgaggccgaagccaccagcatcaaccccgaccggaacaccgtgaccataaaatcattatctgccgttagccagctataccaacctgagaaccatctagggctgcatcaagcagagcctgctgaaattaagtacgattacttaatcagtgctgtaggtgcggaacctaacacatttggtattcccggcgtcaccgactacggtcacttcctgaaggaaattcccaacagcttggaaatacggagaactttcgccgccaacctggagaaggccaacctgctgccaaagggcgaccccgaacggagaagactactgtccattgtcgtggttggtggtggccctactggtgtagaggccgctggtgagctgcaggattacgttcaccaggacctgagaaagtttctccctgcactggccgaggaagtgcaaattcacttggtcgaagctctgcccatcgtgttgaacatgttcgagaaaaagcttagctcatacgcgcagtcacacttagaaaacacttccatcaaggtacacctgagaacggctgtcgccaaagttgaagaaaagcaattgttggccaagaccaagcacgaagacggcaagataaccgaagaaaccattccatacggtactttgatttgggccacgggtaacaaggcaagacccgtaatcacagaccttttcaagaagattcccgagcagaacagctccaagcggggcttggcagtgaatgactttctgcaagtgaaaggcagcaacaacattttcgccattggtgacaatgcatttgctgggttgccaccaacagcccaagtggcccaccaggaggccgaatatttggccaagaattttgataaaatggcccaaataccaaatttccaaaagaatctatcttcaagaaaggataagattgatctcttgttcgaggagaacaactttaaacccttcaagtacaacgatttaggtgccttagcctacctgggaagcgaaagggccattgcaaccatccgtagcggtaagagaacattctacaccggtggaggcctgatgaccttctacttatggagaattttgtacttgagcatgattctatctgcacgcagcagactgaaggtctttttcgactggatcaagttagccttcttcaaaagagacttcttcaaaggactgtag

SEQ ID NO: 851 - DNA, 1542 bp, Artificial Sequence
  source: /note="Description of Artificial Sequence: Synthetic polynucleotide"
atgctgagcaagaatctgtatagtaacaagaggttgctcacctcgacgaatacgctagtcagattcgctagcaccagatccaccggggtcgaaaactccggagcaggtcccacaagctttaagaccatgaaggtcattgaccctcagcacagcgacaaacccaacgtgctgatcctgggctcggggtggggcgccatcagctttttaaagcacattgacaccaagaagtacaacgtctccatcatctctcctagaagctatttcctgtacacgcccttgctgccctctgcacctgttgggacagtggacgaaaagtccatcatcgagcccatcgttaattttgctctcaagaaaaagggcaacgttacctactacgaggcagaagccacctctatcaatcccgaccggaataccgttaccatcaaaagcttatctgccgttagccagctataccaacctgagaaccatctgggcctgcaccaagccgaacccgccgaaattaagtacgattacttaatcagtgctgtaggtgccgagcctaacacatttggtattcctggggtcactgactacggtcatttcctgaaggaaattcccaactctttggaaataagacggacttttgccgccaatctggagaaggccaacttattgcctaagggcgatcccgaaagaagaaggctactgtccattgtggtggttggtggtgggcccacaggcgtagaggctgctggtgaactacaggattacgttcaccaggacctgagaaagtttctccctgcactggccgaagaagtccaaattcacctggtcgaagctctgcccatcgttttgaatatgtttgagaagaagctttcatcatacgcgcagtcacatttagaaaacacttccatcaaggtgcatctgagaaccgccgtggccaaagttgaagaaaagcaattgctggcaaagacgaaacacgaggacggtaaaataaccgaagaaactattccatacggcaccctgatttgggccaccggtaacaaggccagaccggtaatcacagacctgttcaagaagattcccgagcaaaacagctccaagagaggattggccgtgaatgactttttgcaagtgaaaggcagcaacaacattttcgccattggcgacaatgcatttgctgggttgcctccaaccgcccaggtggcgcaccaagaggccgagtatttggccaagaactttgataaaatggcccagataccaaatttccaaaagaatctatcttcaagaaaggataaaattgatctcttgttcgaggagaacaactttaaacccttcaaatacaacgacttaggtgccttagcctacctgggaagcgaaagagccattgccaccatccgttccggtaagcggacattctacaccggtggtggcttaatgaccttctacttatggagaattatctacttgagcatgatcctgtctgccagatcgagattaaaggtctttttcgactggattaaattagcctttttcaaaagagacttttttaaaggcttatga

SEQ ID NO: 852 - DNA, 1542 bp, Artificial Sequence
  source: /note="Description of Artificial Sequence: Synthetic polynucleotide"
atgctgagcaagaatctgtacagtaacaagaggttgctcacctcgaccaataccctcgtcagattcgctagcaccagatccacaggcgtggaaaacagcggagctggtcctacatctttcaagaccatgaaggtcattgaccctcagcacagcgacaaaccaaacgtgctgatcctgggctctgggtggggagctatttcgtttttaaagcacatcgacaccaagaagtacaacgttagcatcgtgtctcctagaagctacttcctgttcacccccctgttaccttctgccccagtggggacagtagacgaaaagtcaatcattgagcccatcgttaattttgccctcaagaaaaagggcaacgtcacctactatgaggccgaagccacctctatcaatcccgaccggaataccgttaccataaaaagcttatctgccgttagccagctataccaacccgagaaccatctagggctgcatcaagcagaacctgctgagattaagtacgattacttaatcagcgctgtgggtgccgaacctaacacatttggtattcctggggtcactgactacggccatttcctgaaagaaattcccaactctctggaaataagaagaacttttgccgccaatctagagaaggctaacctgttgccaaagggcgaccccgagagaagaagactactgagcatcgtcgtcgttggtggtgggcccacaggtgtagaagctgctggtgaactacaggactatgttcaccaggacctgagaaagtttctccccgcattggccgaagaagtccaaattcacttggtcgaagccctgcccatcgttttgaatatgttcgagaagaagctttcatcatacgcgcaatcacacctggaaaacacttcgatcaaagtacatctgagaaccgctgtcgccaaagttgaagaaaagcaattgctggccaagacgaaacacgaggacggtaaaattaccgaagaaactatcccatacggtactttgatttgggccacgggtaacaaggcaagaccggtgatcacagaccttttcaagaagattcccgagcaaaactcgtccaagagaggactggcagtgaacgactttctgcaagtgaaaggcagcaacaacattttcgccatcggtgacaatgcatttgctggcttgcctccaaccgcccaagtggcccaccaagaggccgaatacttggccaagaatttcgataagatggctcaaatacccaatttccagaagaacctatcttccagaaaggataaaattgatctgctgttcgaggagaacaactttaagcccttcaaatacaacgatctgggcgccttagcctacctgggatccgaaagggccattgcaaccatacgttccggtaagagaacattctacaccggtggtggcttaatgaccttctacttatggagaattttgtacatgtccatgatcctgtctgccagatcgagattaaaggtcttcttcgactggattaaattagcatttttcaaaagagacttctttaagggattatag

SEQ ID NO: 853 - DNA, 1542 bp, Artificial Sequence
  source: /note="Description of Artificial Sequence: Synthetic polynucleotide"
atgctgtcgaagaatttgtacagtaacaagaggttgctcacctcgaccaatacgctagtgagattcgctagcaccagatccacaggggtggaaaacagcggagcaggtcctacatcttttaagaccatgaagatcattgaccctcagcacagcgacaaaccaaacgtgctgatactgggttctgggtggggcgctatttcgtttttaaagcacatcgacaccaagaagtacaacgtctccatcatcagccctagaagctatttcctgtttacccctctgttaccttctgcaccagttgggaccgtagacgagaagtcaattattgagcccatcgtgaacttcgctctcaagaaaaagggcaacgttacctactatgaggcagaagccacctctatcaatcccgacaggaataccgtgaccataaagagcttatctgccgtgagccagctataccaacctgaaaaccatctagggctgcaccaagccgaacctgctgaaattaagtacgattacctgatcagtgccgtgggtgccgaacctaacacatttggtattcctggggtgactgactacggtcatttcctgaaagaaattcccaacagcttggaaataagaagaacttttgccgccaacctagaaaaggccaacttattgccaaagggtgatcccgaaagaagaagactactgtccatcgtcgtggttggtggtgggcctactggcgtagaagccgctggtgagctacaggattatgttcaccaggacctgagaaagtttctccccgcattggccgaagaagtccagattcacttggtggaagctctgcccatcgtgctgaatatgttcgagaaaaagcttagctcatacgcgcagtcacacctggaaaacacttccatcaaagtgcatctgagaacggctgtcgccaaagttgaagaaaagcaattgttggccaagacgaagcacgaagacggtaaaataaccgaagaaactatcccatacggtactctgatttgggccaccggtaacaaggccagaccggtgatcacagaccttttcaagaaaattcctgagcagaactcgagcaagagaggcctggcagtgaatgactttctgcaagtcaaaggcagcaacaacattttcgccatcggtgacaatgcatttgccgggttgcctcctaccgcccaggtggcgcaccaggaggccgaatacttggccaagaattttgataaaatggctcaaataccaaatttccaaaagaatctatcttccagaaaggataaaattgacctcctgttcgaggaaaacaacttcaaacccttcaagtacaacgatctgggtgccctggcatacctgggatccgaaagggccattgcaaccatacgtagcggcaagagaaccttttacaccggtggtggcttaatgaccttctacttatggagaattctgtacatgtccatgatcctaagcgcccgcagcagactgaaggtcttcttcgactggattaaattagccttcttcaagagggacttttttaaaggcttatag

SEQ ID NO: 854 - DNA, 1542 bp, Artificial Sequence
  source: /note="Description of Artificial Sequence: Synthetic polynucleotide"
atgctgagcaagaatttgtatagtaacaagaggttgctgacctcgacgaacacgctcgtgagattcgcttccaccagatccacaggcgtcgaaaactccggagctggccccacatcttttaagaccatgaaagtcattgaccctcagcacagcgacaaacccaacgtgctgatcctgggttcggggtggggcgctatttcgtttctgaagcacattgacaccaagaagtacaacgttagcatcgtgtctcctagaagctatttcttatacacgcccctgttaccttctgcaccagtggggaccgtggacgaaaagtcaattattgagcccatcgttaattttgctctgaagaaaaaggggaacgttacctactacgaggcagaagccacctctatcaatcccgacaggaataccgttaccataaagtcactgtctgccgttagccagctataccaacctgagaaccatctagggctgcaccaagccgaacccgccgagattaagtacgattacttaatcagcgccgtaggcgcggaacctaacacatttggtattcctggggtcactgattacggtcacttcctgaaagaaattcccaactctttggaaatacggcggacctttgccgccaatctagagaaggccaacttattgcctaagggcgatcccgaacggagaaggctactgtccattgtcgtcgtgggtggtggccctacaggcgtggaggccgctggcgaactacaggactatgtgcaccaggacctgagaaagtttctccccgccttggccgaagaagtgcaaattcacttggtcgaagctctgcccatcgttttgaacatgtttgagaagaagcttagctcatacgcgcaaagccatttagaaaacacttccatcaaagtacatctgagaacggctgtcgccaaagttgaagaaaagcagttgctggccaagaccaaacacgaagacggtaaaataaccgaagaaaccattccatacggtactttgatttgggccacgggtaacaaggcaagacccgtaatcaccgaccttttcaagaaaattcccgagcaaaacagctccaagcggggattggcagtgaatgacttcttgcaggtgaaaggcagcaacaacatcttcgccattggtgacaacgcctttgctggcttgcctccaaccgcccaagtggcgcaccaagaggccgaatatttggccaagaactttgataaaatggcccaaatacccaatttccaaaagaatctatcttccagaaaggataaaatcgatctgttgttcgaggagaacaactttaaacctttcaaatacaacgatttaggtgccttagcatacctgggcagcgaaagagccattgccaccataagatccggtaagagaaccttctacaccggcggaggcttaatgaccttctacctgtggagaattttgtacctgtccatgattctaagcgcacgctcgagattaaaggtcttcttcgactggatcaaattagcatttttcaaaagagacttttttaaaggattatag

SEQ ID NO: 855 - DNA, 1542 bp, Artificial Sequence
  source: /note="Description of Artificial Sequence: Synthetic polynucleotide"
atgctatcgaagaatctgtatagtaacaagcggttgctcacctcgacgaataccctagtcagattcgcttccaccagatccaccggggtcgaaaactccggagctggtcccacatctttcaagaccatgaaaatcatcgaccctcagcacagcgacaaacccaacgtgctgatactgggctcgggctggggagctatttcgtttttaaagcacattgacaccaagaagtacaacgtttccatcatctctcccagaagctatttcttatttacgcctttgttaccctctgccccagtggggacagtagacgaaaagtcaatcattgagcccatcgttaattttgctctcaagaaaaaggggaacgttacctactacgaggcagaagccaccagcatcaatcccgaccggaataccgttaccatcaagtcattatctgccgttagccagctataccagcctgaaaaccatctagggctgcatcaagccgagcctgctgaaattaagtacgattacttaatcagcgctgtaggtgcggaacctaacacatttggtattcctggggtcactgattacggccacttcctgaaggaaattcccaactctttggaaataagaagaacttttgccgccaatctagaaaaggccaacctgttgcctaagggcgaccccgaaagaagaagactactgtccattgtggtggtgggcggaggccccactggtgtggaggccgctggcgaactgcaggattacgttcaccaggacctgagaaagtttctccctgccttggccgaggaagtccaaattcacttggtcgaagccctgcccatcgtgttgaacatgttcgagaaaaagctgtcatcatacgcgcagtcacatttagaaaacacttccatcaaggtacatctgagaaccgctgtcgccaaagttgaagaaaagcaactgctggccaagaccaaacacgaggacggcaaaataaccgaagaaaccattccatacggtactttgatttgggccacgggtaacaaggccagaccggtaatcacagaccttttcaagaaaattcctgagcaaaacagctccaagcggggcttggcagtgaatgactttctgcaggtcaaaggcagcaacaacatcttcgccatcggtgacaatgcatttgccgggttgccaccaaccgcccaagtggcccaccaagaagccgaatatttggccaagaattttgataaaatggcccagatacccaatttccagaagaatctatcttccagaaaggataaaattgatctcttgttcgaggaaaacaactttaaacccttcaaatacaacgacttaggtgccttagcatacctgggcagcgaaagggccattgcaaccatcagatccggcaagagaacattttacaccggtggtggcttaatgaccttctacctgtggagaatcatctacatgtccatgattctgagcgccagatcgagattaaaggtctttttcgactggatcaagctggcatttttcaaaagagacttctttaaaggactgtga

SEQ ID NO: 856 - DNA, 1542 bp, Artificial Sequence
  source: /note="Description of Artificial Sequence: Synthetic polynucleotide"
atgctatcgaagaatctgtatagcaacaagcggttgctgacctcgacgaatacgctcgtgagattcgcctccaccagatccacaggggtggaaaacagcggagcaggtcctacatctttcaagaccatgaaggtcattgaccctcagcacagcgacaaaccaaacgtgctgatcctgggttctgggtggggagccatttcgtttttaaagcacattgacaccaagaagtacaacgttagcatcatctctcctagaagctatttcttatacacgcctctgttacctagcgcaccagttgggacagtggacgagaagtcaattattgagcccatcgttaattttgctctgaagaaaaagggcaacgttacctactatgaggccgaagccacctctatcaaccccgacaggaataccgtgaccatcaaatcattatctgccgtgagccagctataccaacccgaaaaccatctaggcctgcatcaggcagaacctgccgaaattaagtacgactatctgatcagtgctgtgggtgccgaacctaacacatttggtattcctggcgtcactgattacggtcacttcctgaaagaaatccccaactctttggaaatacggcggacctttgccgccaacctagagaaggctaacctgttgcctaagggtgaccccgaaagaagaagactactgtccattgtcgtggtgggtggtgggcccactggcgtagaggccgctggcgaactacaggactatgtgcaccaggacctgagaaagttcctccctgccctggccgaagaagtccaaattcacttggtcgaagccctgcccatcgttttgaatatgtttgagaaaaagctttcatcatacgcccaatcacatttagaaaacacttcgatcaaagtgcacctgagaacggccgtcgccaaggttgaagaaaagcaactgttggcaaagacgaaacacgaagacggtaagataaccgaagaaaccatcccatacggtactctgatttgggccaccggcaacaaggcaagaccggtgatcacagacctgttcaagaaaattcccgagcaaaactcgtccaagagaggattggcagtgaatgactttttgcaggtcaaaggcagcaacaacattttcgccatcggcgacaacgcctttgccgggttgccaccaaccgcccaagtggcgcaccaggaggccgaatatttggccaagaatttcgacaaaatggctcagatacccaatttccagaagaatctatcttcaagaaaggataagatcgatctcctgttcgaggagaacaactttaagcccttcaagtacaacgatttaggcgccttagcatacctgggctccgaaagggccattgccaccatccgttccggcaagagaacattctacaccggtggaggcttaatgaccttctacttatggagaattatctacatgtccatgatcctgtctgccagaagcagattaaaggtctttttcgactggattaaattagcatttttcaaaagagacttttttaaaggattatag

SEQ ID NO: 857 - DNA, 1542 bp, Artificial Sequence
  source: /note="Description of Artificial Sequence: Synthetic polynucleotide"
atgctaagcaagaatctgtatagtaacaagaggctgctgaccagcaccaacacgctagtgagattcgcttccaccagatccacaggggtggaaaactccggagctggccctacatcttttaagaccatgaaagtcattgaccctcagcacagcgacaaacccaacgtgctgatactgggctcggggtggggcgccatttcgtttctgaagcacattgacaccaagaagtacaacgttagcatcatctctcctagaagctatttcttatacacgcctttgttacctagcgcacctgttgggacagtagacgaaaagtccattatcgagcccatcgttaattttgccctcaagaaaaagggcaacgttacctactatgaggccgaagccacctctatcaatcccgacaggaacaccgttaccataaaatcactgtctgccgtgtcccagctgtaccagcctgagaaccatctaggcctgcatcaggcagaacccgctgagattaagtacgattatctgatcagtgccgtaggtgccgagcctaacacatttggaattcccggggtgactgattacggtcatttcctgaaggaaattcccaactctttggaaatacggcggaccttcgccgccaatctagagaaggctaacttactgccaaagggtgatcccgaacggagaaggctactgtccattgtcgtggttggcggagggcctactggcgtggaggccgctggtgaactacaggactatgttcaccaggacctgagaaagttcctccctgcattggccgaagaaatccaaattcacttggtggaagctctgcccatcgtgctgaatatgtttgagaaaaagcttagctcatacgcgcaaagccacttagaaaacacctccatcaaagtacatctgagaacggctgtcgccaaagttgaagaaaagcaattgctggcaaagaccaaacacgaggacggtaaaattaccgaagaaaccattccctacggtactttgatttgggccacgggtaacaaggccagacccgtgatcaccgaccttttcaagaaaattcctgagcaaaacagctccaagcggggattggcagtgaatgacttcttgcaggtgaaaggcagcaacaacatcttcgccattggtgacaatgcctttgctgggttgcctccaaccgcccaagtggcccaccaagaggccgaatatctggccaagaatttcgataagatggctcaaataccaaatttccaaaagaatctatcttcaagaaaggataaaattgatctgttgttcgaggaaaacaactttaagcctttcaaatacaacgatttaggtgccttagcctacctgggctccgaaagggccattgcaaccatacgttccggtaagagaacattttacaccggtggtggcctgatgaccttctacttatggcggattatctacctgtccatgattctgagcgccagatcgagattaaaggtgtttttcgactggattaaattagcctttttcaaaagggactttttcaaaggactgtag

SEQ ID NO: 858 - DNA, 1542 bp, Artificial Sequence
  source: /note="Description of Artificial Sequence: Synthetic polynucleotide"
atgctatcgaagaacttgtatagcaacaagaggttgctcacctcgaccaataccctcgtgagattcgcttccaccagatccaccggcgtcgaaaactccggagcaggtcctacatctttcaagaccatgaaagtcattgaccctcagcacagcgacaagcccaacgtgctgatactgggttcggggtggggcgccatctcgtttctgaagcacattgacaccaagaagtacaacgtttccatcgtgtctcctagaagctatttcctgttcacgcctctgttaccttctgcaccagtgggaacagtagacgaaaagtccattattgagcccatcgttaattttgctctcaagaaaaaggggaacgtcacctactatgaggccgaagccaccagcatcaaccccgacaggaacaccgttaccataaaatcattatctgccgtgagccagctgtaccaacctgaaaaccatctggggctgcatcaggcagaacctgctgaaattaagtacgattatttaatcagtgctgtaggtgcggaacctaacacctttggtattcctggggtcactgattacggccatttcctgaaggaaattcccaactctttggaaatcagacggacctttgccgccaatctagagaaggctaacctgttgccaaagggtgatcccgaacggagaagactgctgtccattgtcgtggttggcggagggcccacaggtgtagaggccgctggtgaactacaggactacgttcaccaggacctgagaaagtttctccctgccttggccgaagaaatccaaattcacttggtcgaagccctgcccatcgttttgaacatgttcgagaagaagctttcatcatacgcgcaatcacatttagaaaacacctcgatcaaagtacacctgagaacggctgtcgccaaagttgaagaaaagcagttgttggcaaagacgaaacacgaagacggcaaaattaccgaagaaactattccatacggcactttgatttgggccaccggtaacaaggccagaccggtgatcacagacctgttcaagaaaatccccgagcaaaacagctccaagagaggattggcagtgaatgacttcttgcaggtgaaaggcagcaacaacattttcgccatcggtgacaatgcatttgctgggctgcctcctacagcccaagtggcgcaccaggaggccgaatacctggccaagaatttcgataaaatggctcaaatacccaatttccaaaagaatctatcttcccggaaggataaaatcgacctcctgttcgaggagaacaacttcaaacctttcaaatacaacgacctgggtgccttagcctacctgggatccgaaagggccattgccaccataagaagcggcaagagaacattctacaccggtggtggcctgatgaccttctacttatggagaattatctacttgtccatgatcctatctgcacgcagcagactgaaggtctttttcgactggattaagttagcatttttcaaaagggactttttcaaaggcctgtag

SEQ ID NO: 859 - DNA, 1542 bp, Artificial Sequence
  source: /note="Description of Artificial Sequence: Synthetic polynucleotide"
atgctatcgaagaatttgtatagcaacaagaggctgctcaccagcaccaataccctcgtcagattcgctagcaccagatccacaggggtcgaaaactccggagctggtcctacaagcttcaagaccatgaagatcatcgacccccagcacagcgacaaacccaacgtgctgatcctgggctcggggtggggcgctatttcgtttttaaagcacattgacaccaagaagtacaacgtttccatcatctctcccagaagctatttcatctttacgcctttgctgccctctgccccagttggaacagtagacgaaaagtcaattattgagcccatcgttaatttcgctctcaagaaaaagggcaacgttacctactatgaggcagaggccacctctatcaatcccgacaggaataccgttaccataaagagcctgtctgccgtgagccagctataccagcctgaaaaccacctggggctgcatcaagcagaacccgctgaaattaagtacgactatttaatcagcgctgtaggtgcggaacccaacacctttggtatccctggggtcactgactacggtcatttcctgaaagagattcccaactctttggaaatacggagaactttcgccgccaatctagagaaggctaacttattgcctaagggcgatcccgaaagaagaagactactgtccattgtggtggtgggcggtggccccactggtgtggaggccgctggtgaactacaggactatgttcaccaggacctgagaaagttcctccccgcattggccgaggaaatccaaattcacctggtggaagctctgcccatcgtgttgaatatgtttgagaagaagctttcatcatacgcgcagtcacacttagaaaacacttcgatcaaagtgcatctgagaacggccgtcgccaaagttgaagaaaagcaattgttggcaaagacgaaacacgaagacggtaaaataaccgaagaaactattccatacggtactttgatttgggccacgggtaacaaggccagaccggtaatcacagaccttttcaagaaaatccctgagcaaaactcgtccaagcggggcttggcagtgaacgactttttgcaagtgaaaggcagcaacaacatcttcgccattggcgacaatgcatttgccgggttgcctccaaccgcccaagtggcccaccaggaggccgaatatttggccaagaatttcgataaaatggctcaaatacccaatttccagaagaatctatcctccagaaaggataaaattgacctcttgttcgaggaaaacaactttaaacctttcaagtacaacgatttaggtgccctggcatacctgggctccgaaagggccattgccaccatacgtagcggtaagagaaccttttacaccggtggaggcttaatgaccttctacctgtggagaattttgtacttgtccatgattctatctgcaagatcgagactgaaggtcttcttcgactggatcaaactggcattcttcaaaagggacttctttaaaggcttatga

SEQ ID NO: 860 - DNA, 1542 bp, Artificial Sequence
  source: /note="Description of Artificial Sequence: Synthetic polynucleotide"
atgctgagcaagaatttgtacagcaacaagaggttgctcaccagcacgaataccctagtccgcttcgcttccaccagatccaccggcgtggaaaactccggagcaggccctaccagctttaagaccatgaaagtcatcgaccctcagcacagcgacaaaccaaacgtgctgatactgggttcgggctggggcgctatttcgtttctgaagcacatcgacaccaagaagtacaacgttagcatcatctctcctagaagctatttcatctttacgcccttgttaccttctgcacctgttgggacagtagacgagaagtcaattattgagcccatcgttaattttgccctcaagaaaaaggggaacgtcacctactatgaggcagaggccacctctatcaaccccgacaggaataccgttaccataaaatcactgtctgccgtttcccagctataccagcccgaaaaccatctgggcctgcaccaagccgaacccgctgaaattaagtacgattacttaatcagtgccgtaggtgcggagcctaacacatttggtattcctggggtcactgactacggtcatttcctgaaagaaattcccaacagcttggaaataagaagaacttttgccgccaatctagagaaggccaacctgttgccaaagggtgatcccgaacggagaaggctactgtccattgtggtggttggtggtggccctactggtgtggaggctgctggtgaactacaggattatgttcaccaggacctgagaaagtttctccctgcattggccgaggaaatccagattcacttggtcgaagccctgcccatcgttctgaatatgtttgagaagaagctgtcatcatacgcccagtcacatttagaaaacacctccatcaaagtgcacctgagaacggccgtcgccaaggttgaagagaagcaattgttggccaagaccaaacacgaagacggtaaaattaccgaagaaactatcccctacggtactttgatttgggccaccggtaacaaggccagacccgtaatcacagacctgttcaagaaaattcctgagcaaaactcgagcaagagaggactggcagtgaacgacttcctgcaagtgaaaggcagcaacaacattttcgccattggcgacaacgcatttgctggcttgccacctaccgcccaggtggcgcaccaagaggccgaatatttggccaagaattttgacaaaatggctcaaatccccaatttccaaaagaatctatcctcaagaaaggataaaattgatctcttgttcgaggagaacaacttcaaacctttcaaatacaacgatttaggcgccttagcctacctgggaagcgaaagggccattgcaaccatacgttccggtaagagaacattttacaccggtggtggcttaatgaccttctacctgtggagaatcttgtacatgtccatgatcctaagcgcaagatcgagattaaaggtctttttcgactggattaaactggccttcttcaaaagagacttttttaaaggcctgtga

SEQ ID NO: 861 - DNA, 1542 bp, Artificial Sequence
  source: /note="Description of Artificial Sequence: Synthetic polynucleotide"
atgctgtcgaagaacttgtatagcaacaagaggttgctgacctcgaccaacacgctagtcagattcgcttccaccagatccacaggggtcgaaaacagcggagctggtcccacctcttttaagaccatgaaaatcattgaccctcagcacagcgacaaacccaacgtgctgatactgggttctggctggggcgctatttcgtttttaaagcacatcgacaccaagaagtacaacgtctccatcatctctcctagaagctatttcctgtacacccctttgttaccttctgcaccagttggaacagtagacgagaagtccattattgagcccatcgtgaactttgccctgaagaaaaaggggaacgttacctactacgaggcagaagccacctctatcaatcccgacaggaataccgttaccataaaatcattatctgccgttagccagctataccaacctgaaaaccatctaggcctgcaccaagcagaacccgctgagattaagtacgactacttaatcagcgctgtgggcgcggaacccaacacctttggtattcccggcgtcactgactacggccatttcctgaaggaaattcccaactctctggaaataagaagaacttttgccgccaatctagaaaaggctaacttattgccaaagggtgatcccgaacggagaagactactgagcatcgtggtggttggtggtgggcccactggtgtggaggccgctggtgagctacaggattacgttcaccaggacctgagaaagtttctgcctgcattggccgaagaagtccaaattcacctggtcgaagctctgcccatcgtgttgaatatgtttgagaagaagctgtcaagctacgcgcaatcacatctggaaaacacctccatcaaagtgcacctgagaaccgccgtcgccaaggttgaagaaaagcaattgctggcaaagacgaaacacgaagacggtaaaataaccgaagaaactattccctacggcactctgatttgggccaccggtaacaaggcaagacccgtaatcacagacctgttcaagaaaattcctgagcaaaactcgagcaagcggggattggcagtgaatgactttttgcaggtgaaaggcagcaacaacatcttcgccattggcgacaatgcctttgccgggttgcctccaaccgcccaagtggcccaccaagaggccgaatatttggccaagaattttgataaaatggcccagataccaaatttccaaaagaatctatcttcaagaaaggataagatcgatctgttgttcgaggaaaacaacttcaaacctttcaaatacaacgacttaggtgccttagcatacctgggatccgaaagagccattgcaaccatacgtagcggtaagagaacattttacaccggtggtggcttaatgaccttctacttatggagaattttgtacatgtccatgattctgtctgccagatcgagattaaaggtgtttttcgactggattaaactggcctttttcaagagagacttctttaaaggattatga

SEQ ID NO: 862 - DNA, 1542 bp, Artificial Sequence
  source: /note="Description of Artificial Sequence: Synthetic polynucleotide"
atgctaagcaagaatctgtatagcaacaagaggttgctcacctcgacgaatacgctagtcagattcgctagcaccagatccacaggggtcgaaaacagcggagcaggtcctacctcttttaagaccatgaagatcattgaccctcagcacagcgacaaaccaaacgtgctgatcctgggctcggggtggggagctatttcgtttttaaagcacattgacaccaagaagtacaacgtctccatcatctctcccagaagctatttcctgtttacccctctgttaccttctgcaccagttggaacagtagacgaaaagtccattattgagcccatcgtgaactttgctctcaagaaaaagggcaacgttacctactatgaggcagaagccacctctatcaatcccgacaggaacaccgttaccatcaagagcttaagcgccgttagccagctataccagcctgaaaaccacctagggctgcatcaagcagagcccgctgaaattaagtacgactatctgatcagtgccgtaggcgcggaacctaacacatttggaattcctggggtcactgattacggtcacttcctgaaagagattcccaactctttggaaataagacggacttttgccgccaatctagaaaaggctaacttattgcctaagggcgaccccgagagaagaaggctactgtccattgtcgtggttggtggtgggcctactggcgtagaagccgctggtgaactacaggattatgttcaccaggacctgagaaagtttctgcctgccctggccgaggaaatccagattcacctggtggaagctctgcccatcgttctgaacatgtttgagaaaaagctgtcatcatacgcccaatcacacttagaaaacacttcgatcaaagtgcatctgagaacggccgtcgccaaggttgaagagaagcaactgttggcaaagaccaaacacgaagacggcaagattaccgaggaaactattccctacggtactttgatttgggccacgggtaacaaggccagaccggtaatcacagacctgttcaagaaaattcccgagcaaaactcgtccaagagaggcttggcagtgaatgactttttgcaggtcaaaggcagcaacaacattttcgccattggtgacaacgcctttgccgggctgcctccaaccgcccaagtggcgcaccaagaggccgaatatttggccaagaattttgacaaaatggcccaaataccaaatttccaaaagaatctatcttccagaaaggataaaattgacctgctgttcgaggagaacaactttaaacccttcaaatacaacgatttaggcgccctggcatacctgggctccgaaagggccattgcaaccatcagatccggtaagagaacattttacaccggcggtggcttaatgaccttctacttatggagaatcctgtacatgtccatgattctatctgcaagatcgagactgaaggtgtttttcgactggatcaaattagcatttttcaaaagagacttttttaaaggactgtga

SEQ ID NO: 863 - DNA, 1542 bp, Artificial Sequence
  source: /note="Description of Artificial Sequence: Synthetic polynucleotide"
atgctgagcaagaatttgtatagtaacaagaggttgctgaccagcaccaacaccctagtcagattcgccagcaccagatccacaggcgtggaaaacagcggagcaggtcctacatcttttaagaccatgaagatcatcgaccctcagcacagcgacaaaccaaacgtgctgatactgggttctgggtggggagctatttcgtttttaaagcacatcgacaccaagaagtacaacgtttccatcatctctcctagaagctatttcatcttcacccccctgttaccctctgcccctgttggaacagtagacgaaaagtccattatcgagcccatcgttaattttgctctcaagaaaaagggcaacgtcacctactatgaggcagaagccacctctatcaatcccgaccggaacaccgttaccataaaatcactgagcgccgttagccagctataccaacccgagaaccatctagggctgcatcaagccgaacctgctgaaattaagtacgattatctgatcagtgccgtaggtgcggagcctaacacatttggtattcccggggtgactgattacggccatttcctgaaggaaatccccaactctttggaaataagaagaacttttgccgccaacctggagaaggctaacttattgcctaagggcgatcccgaacggagaagactactgtccatcgtcgtcgttggcggtgggcctactggtgtagaggctgctggtgaactgcaggattatgttcaccaggacctgcggaagtttctccccgccttggccgaagaagtgcaaattcacttggtggaagccctgcccatcgtgttgaacatgtttgagaaaaagcttagctcatacgcccagagccatttagaaaacacttcgatcaaagtacatctgagaaccgccgtcgccaaggttgaagagaagcaattgttggcaaagacgaaacacgaagacggtaaaattaccgaagaaaccattccctacggtactttgatttgggccacgggtaacaaggccagacccgtgatcaccgaccttttcaagaagattcctgagcaaaactcgtccaagagaggcttggccgtgaatgactttttgcaggtcaaaggcagcaacaacattttcgccattggtgacaatgcctttgccgggttgccaccaaccgcccaagtggcgcaccaggaagccgaatatttggccaagaactttgacaaaatggcccaaataccaaatttccagaagaatctatcttcaagaaaggataaaattgacctcttgttcgaggagaacaactttaaacctttcaaatacaacgatttaggtgccttagcatacctgggatccgaaagggccattgcaaccataagatccggtaagagaacattctacaccggtggtggcttaatgaccttctacctgtggagaattatctacttgtccatgattctgagcgcccgctcgagattaaaggtctttttcgactggatcaagttagcattcttcaaaagggacttttttaaaggattatag

SEQ ID NO: 864 - DNA, 1542 bp, Artificial Sequence
  source: /note="Description of Artificial Sequence: Synthetic polynucleotide"
atgctgagcaagaatttgtatagtaacaagaggttgctcacctcgacgaacacgctcgtgagattcgcttccaccagatccacaggcgtggaaaactccggagcaggccctacatcttttaagaccatgaaaatcattgaccctcagcacagcgacaaacccaacgtgctgatactgggttcggggtggggagctatttcgtttctgaagcacatcgacaccaagaagtacaacgtctccatcatctctcctagaagctatttcatctacacgcccctgttaccttctgcaccagtggggacagtagacgagaagtcaatcattgagcccatcgttaatttcgctctcaagaaaaagggcaacgttacctactacgaggcagaagccacctctatcaatcccgacaggaacaccgtgaccataaaatcactgtctgccgttagccagctataccaacctgagaaccatctagggctgcatcaggcagaacctgctgaaattaagtacgattatctgatcagcgccgtaggcgcggagcctaacacctttggtatccctggcgtgactgattacggtcatttcctgaaggagattcccaacagcttggaaatcagaagaactttcgccgccaacctagagaaggccaacttattgccaaagggcgatcccgaaagaagaaggctactgtccatcgtcgtggttggtggaggccctactggtgtggaggccgctggtgagctacaggattatgttcaccaggacctgagaaagtttctgcccgccttggccgaagaagtccaaattcacttggtcgaagccctgcccatcgtgttgaacatgtttgagaaaaagctttcatcatacgcccaatcacatttagaaaacacctcgatcaaagtacatctgagaaccgctgtcgccaaagttgaagagaagcaattgctggcaaagacgaaacacgaagacggtaagattaccgaagaaactattccatacggcactctgatttgggccacgggcaacaaggcaagaccggtaatcacagaccttttcaagaaaattcccgagcagaacagctccaagagaggattggccgtgaacgacttcctgcaagtcaaaggcagcaacaacattttcgccattggtgacaatgcatttgctggcctgccaccaaccgcccaagtggcccaccaggaggccgagtatttggccaagaattttgataagatggctcaaatacccaatttccaaaagaatctatcctcacggaaggataagattgatctgttgttcgaggagaacaactttaaacctttcaaatacaacgacctgggtgccttagcatacctgggaagcgaaagggccattgcaaccatccgttccggtaagagaaccttttacaccggtggaggcttaatgaccttctacttatggagaatcttgtacttgtccatgatcctgtctgccagatcgagattaaaggtcttcttcgactggattaagttagcctttttcaagagagactttttcaagggactgtag

SEQ ID NO: 865 - DNA, 1542 bp, Artificial Sequence
  source: /note="Description of Artificial Sequence: Synthetic polynucleotide"
atgctgtcgaagaatctgtatagtaacaagaggttgctgacctcgacgaatacgctcgtcagattcgcttccaccagatccacaggcgtcgaaaacagcggagctggtcccacaagcttcaagaccatgaagatcattgacccccagcacagcgacaaacccaacgtgctgatcctgggttcgggctggggcgctattagctttttaaagcacattgacaccaagaagtacaacgtctccatcgtgtctcctagaagctatttcttatacacgcctttgctgccctctgcaccagtgggaaccgtggacgagaagtcaattatcgagcccatcgtgaacttcgctctcaagaaaaaggggaacgttacctactatgaggccgaagccaccagcatcaatcccgacaggaacaccgttaccataaaaagcttatctgccgttagccagctataccaacctgagaaccacctgggcctgcatcaagcagagcctgccgaaattaagtacgattacttaatcagtgctgtaggcgcggaacccaacacatttggtatccctggggtcactgattacggtcatttcctgaaagagattcccaactctttggaaataagaagaacttttgccgccaacctagagaaggctaacttattgccaaagggtgaccccgaaagaagaagactactgagcatcgtcgtggtgggcggtggccccactggtgtagaggccgctggtgaactacaggattatgttcaccaggacctgagaaagtttctccctgcattggccgaagaagtccaaattcacttggtggaagccctgcccatcgttttgaatatgtttgagaaaaagcttagcagctacgcgcagtcacatctggaaaacacctcgatcaaagtacacctgagaacggccgtggccaaagttgaagaaaagcaactgttggccaagaccaaacacgaagacggtaaaataaccgaggaaactattccatacggtactctgatttgggccacgggcaacaaggccagacccgtaatcacagaccttttcaagaaaatccctgagcaaaactcgtccaagcggggattggcagtgaatgactttttgcaagtcaaaggcagcaacaacatcttcgccattggtgacaatgcatttgctgggttgcctccaaccgcccaagtggcgcaccaggaggccgaatatttggccaagaatttcgacaagatggctcaaatacccaatttccaaaagaacctatcttcacggaaggataaaatcgacctcctgttcgaggagaacaacttcaaacctttcaaatacaacgatttaggtgccttagcatacctgggcagcgaaagggccattgcaaccatccgttccggtaagcggaccttttacaccggtggaggcttaatgaccttctacttatggagaatcttgtacatgtccatgattctatctgccagaagcagactgaaggtctttttcgactggattaaattagcatttttcaaaagagacttttttaagggattatga

SEQ ID NO: 866 - DNA, 1542 bp, Artificial Sequence
  source: /note="Description of Artificial Sequence: Synthetic polynucleotide"
atgctatcgaagaacttgtatagcaacaagcggttgctcacctcgacgaatacgctagtcagattcgcttccaccagatccacaggggtcgaaaacagcggagcaggtcccacatctttcaagaccatgaaggtcatcgaccctcagcacagcgacaaacccaacgtgctgatcctgggttctgggtggggagctatttcgtttttaaagcacattgacaccaagaagtacaacgtttccatcgtgtctcccagaagctacttcatctacacccccttgttaccttctgcaccagtgggaacagtagacgaaaagtcaatcattgagcccatcgttaatttcgccctcaagaaaaagggcaacgttacctactatgaggcagaagccacctctatcaatcccgacaggaacaccgttaccataaagtcattaagcgccgtttcccagctgtaccaacccgaaaaccacctagggctgcatcaagcagagcccgctgagattaagtacgattatttaatcagtgctgtaggtgccgaacctaacacatttggaattcccggcgtcactgattacggtcacttcctgaaggaaattcccaactctttggaaatacggcggaccttcgccgccaatctagagaaggctaacttattgcctaagggtgaccccgaaagaagaaggctactgtccattgtcgtggttggtggtggccctactggtgtagaagccgctggtgagctacaggattacgtgcaccaggacctgagaaagttcctgcctgccttggccgaagaaatccaaattcacttggtcgaagctctgcccatcgtgttgaacatgtttgagaaaaagctgagctcatacgcgcagagccacctggaaaacacctccatcaaagtacatctgagaacggctgtcgccaaggttgaagagaagcaattgctggcaaagaccaaacacgaggacggcaaaataaccgaagaaactattccatacggtactttgatttgggccacgggcaacaaggcaagaccggtgatcacagaccttttcaagaaaattcctgagcagaactcgtccaagagaggattggcagtgaatgacttcttgcaagtgaaaggcagcaacaacatcttcgccattggcgacaatgcatttgctgggctgcctccaacagcccaggtggcgcaccaggaggccgaatatctggccaagaactttgacaaaatggcccagatacccaatttccaaaagaacctatcttcaagaaaggataaaatcgatctcctgttcgaggagaacaactttaaacctttcaaatacaacgatctgggtgccttagcatacctgggctccgaaagggccattgcaaccatacgttccggtaagagaacattctacaccggtggtggcctgatgaccttctacttatggagaattctgtacttgtccatgatcctgtctgcacgctcgagactgaaggtgtttttcgactggattaaattagcatttttcaaaagagacttctttaaaggattatag

SEQ ID NO: 867 - DNA, 1542 bp, Artificial Sequence
  source: /note="Description of Artificial Sequence: Synthetic polynucleotide"
atgctatcgaagaatctgtatagtaacaagaggttgctcacctcgacgaatacgctcgtcagattcgcctccaccagatccacaggcgtggaaaactccggagcaggtcctacctctttcaagaccatgaaggtcatcgacccccagcacagcgacaaacccaacgtgctgatactgggttctggctggggagccatttcgtttttaaagcacattgacaccaagaagtacaacgtttccatcgtgagccctagaagctatttcatcttcacgcccttgctgcctagcgcaccagtgggaaccgtggacgaaaagtcaattatcgagcccatcgtgaacttcgccctcaagaaaaagggcaacgttacctactatgaggcagaggccaccagcatcaaccccgaccggaataccgttaccataaaatcattaagcgccgttagccagctataccaacctgagaaccatctagggctgcaccaggcagagcctgccgaaattaagtacgattatttaatcagtgccgtaggcgcggaacctaacacatttggtattcctggggtcaccgattacggtcatttcctgaaagaaattcccaactctctggaaatccggagaacttttgccgccaacctagagaaggccaacttattgcctaagggtgatcccgagcggagaagactgctgtccattgtcgtggtgggtggtgggcctactggtgtagaggctgctggtgaactacaggattatgttcaccaggacctgagaaagtttctccccgcattggccgaagaaatccagattcacctggtcgaagctctgcccatcgttttgaacatgtttgagaaaaagcttagctcatacgcgcaatcacacctggaaaacacctccatcaaagtacatctgagaaccgccgtcgccaaggttgaagaaaagcagctgttggccaagaccaaacacgaagacggtaaaattaccgaagaaactattccatacggtactttgatttgggccacgggtaacaaggcaagacccgtgatcacagaccttttcaagaagattcccgagcagaactcgtccaagagaggattggcagtgaatgactttctgcaagtgaaaggcagcaacaacatcttcgccattggtgacaacgcatttgctgggttgccacctaccgcccaggtggcgcaccaagaagccgaatatttggccaagaattttgacaaaatggctcaaatcccaaatttccaaaagaacctatcctcaagaaaggataaaattgatctcttgttcgaggaaaacaacttcaagcctttcaaatacaacgacttaggtgccttagcctacctgggaagcgaaagggccattgccaccatccgttccggtaagagaacattttacaccggtggtggcttaatgaccttctacttatggcggattatctacttgtccatgattctgtctgcaagatcgagattaaaggtgtttttcgactggattaagttagcattcttcaaaagagacttttttaagggactgtag

SEQ ID NO: 868 - DNA, 1542 bp, Artificial Sequence
  source: /note="Description of Artificial Sequence: Synthetic polynucleotide"
atgctgagcaagaacctgtacagcaacaagcggttgctcacctcgacgaacaccctagtccgcttcgcttccaccagatccacaggggtcgaaaactccggagcaggtcctaccagcttcaagaccatgaaagtcattgaccctcagcacagcgacaagccaaacgtgctgatactgggttctgggtggggcgccatttcgtttttaaagcacattgacaccaagaagtacaacgtttccatcgtgtctcctagaagctacttcatctttacccctttgctgccttctgcaccagttgggacagtggacgaaaagtcaattatcgagcccatcgtgaattttgccctcaagaaaaaggggaacgtcacctactatgaggcagaagccacctctatcaatcccgacaggaataccgttaccataaaaagcttaagcgccgttagccagctgtaccaacctgagaaccacctagggctgcatcaagcagagcccgctgagattaagtacgattatttaatcagtgctgtaggtgccgagcctaacacatttggtattcctggggtcactgattacggtcatttcctgaaggaaattcccaactctttggaaatcagacggacctttgccgccaatctagagaaggccaacttattgccaaagggtgatcccgaaagaagaagactactgagcattgtcgtggtgggtggagggcctacaggtgtagaagctgctggtgaactacaggattacgttcaccaggacctgcggaagtttctccctgcactggccgaagaaatccaaattcacttggtggaagctctgcccatcgttctgaatatgttcgagaaaaagctttcatcatacgcccaatcacacttagaaaacacttcgatcaaagtacatctgagaacggctgtggccaaagtggaagagaagcaattgttggcaaagacgaaacacgaggacggtaagataaccgaggaaaccattccctacggtactctgatttgggccacgggtaacaaggcaagacccgtaatcaccgaccttttcaagaaaattcctgagcagaactcgagcaagagaggattggcagtgaatgactttttgcaagtgaaaggcagcaacaacattttcgccatcggcgacaatgcatttgccggcctgccaccaacagcccaagtggcccaccaagaggccgaatatttggccaagaatttcgacaaaatggctcagataccaaatttccagaagaatctatcctccagaaaggataaaattgatctcctgttcgaggaaaacaactttaagcccttcaaatacaacgatttaggcgccttagcctacctgggcagcgaaagagccattgccaccatccgttccggcaagagaaccttctacaccggcggtggcttaatgaccttctacttatggagaattttgtacatgtccatgattctgtctgcaagatcgagattaaaggtctttttcgactggattaagctggcattcttcaaaagagacttctttaaaggattatag

SEQ ID NO: 869 - DNA, 1542 bp, Artificial Sequence
  source: /note="Description of Artificial Sequence: Synthetic polynucleotide"
atgctgtcgaagaatttgtatagtaacaagcggctgctcaccagcacgaatacgctagtcagattcgccagcaccagatccaccggggtggaaaactccggggcaggtcctacatcttttaagaccatgaaagtcattgacccccagcacagcgacaaaccaaacgtgctgatactgggttctgggtggggagccatcagctttttaaagcacattgacaccaagaagtacaacgtcagcatcatctctcccagaagctatttcatctacacgcctttgttaccctctgcccctgtggggacagtagacgagaagtcaatcattgagcccatcgttaattttgctctgaagaaaaaggggaacgtcacctactacgaggcagaagccacctctatcaatcccgaccggaacaccgttaccatcaagtcattaagcgccgtgagccagctgtaccaacccgaaaaccacctggggctgcaccaagcagaacctgctgaaattaagtacgattatttaatcagcgctgtaggtgcggaacctaacacatttggtattcccggggtcaccgattacggtcatttcctgaaggagattcccaacagcctggaaataagacggacttttgccgccaatctagagaaggctaacttattgccaaagggtgatcccgaaagaagaaggctactgtccatcgtggtggttggtggagggcccactggcgtagaggctgctggtgaactgcaggattatgtgcaccaggacctgagaaagtttctgcctgcattggccgaagaaatccaaattcacttggtcgaagctctgcccatcgttttgaacatgtttgagaaaaagctttcatcatacgcccaaagccacttagaaaacacctcgatcaaagtacatctgagaacggctgtcgccaaagttgaagaaaagcaattgttggcaaagaccaaacacgaagacggtaaaataaccgaggaaactattccctacggtactttgatttgggccacgggtaacaaggcaagacccgtaatcacagaccttttcaagaaaattcccgagcaaaactcgagcaagagaggattggccgtgaacgactttttgcaagtgaaaggcagcaacaacattttcgccattggtgacaacgcctttgccggcttgccacctacagcccaggtggcgcaccaagaggccgaatatttggccaagaacttcgataaaatggctcaaatacccaatttccaaaagaatctgtcctccagaaaggataagattgatctgttgttcgaggagaacaactttaagcctttcaaatacaacgacttaggcgccctggcatacctgggatccgaaagggccattgcaaccatccgttccggcaagagaaccttttacaccggcggtggcttaatgaccttctacttatggagaattatctacttgagcatgatcctatctgcaagatcgagactgaaggtgtttttcgactggatcaaattagcattcttcaaaagagacttctttaaaggactgtag

SEQ ID NO: 870 - DNA, 1542 bp, Artificial Sequence
  source: /note="Description of Artificial Sequence: Synthetic polynucleotide"
atgctatcgaagaatttgtacagtaacaagcggctgctcacctcgacgaacaccctagtgagattcgcttccaccagatccaccggggtcgaaaactccggagcaggtcctacctcttttaagaccatgaaaatcatcgaccctcagcacagcgacaaaccaaacgtgctgatcctgggttcgggctggggagctattagctttttaaagcacattgacaccaagaagtacaacgtcagcatcatcagccccagaagctacttcatctacacgcctttgctgccttctgcaccagttgggacagtggacgaaaagtcaattattgagcccatcgttaacttcgctctcaagaaaaaggggaacgttacctactacgaggcagaagccaccagcatcaaccccgacaggaataccgtgaccataaaaagcttaagcgccgtttcccagctataccaacccgagaaccatctagggctgcatcaagcagaacctgctgaaattaagtacgattacttaatcagtgctgtaggtgcggagcctaacacctttggaattcctggcgtcactgattacggtcacttcctgaaggaaatccccaacagcctggaaataagacggacttttgccgccaacctagagaaggccaacttattgccaaagggtgatcccgagagaagaagactactgtccatcgtcgtggtgggcggagggcccactggtgtagaggccgctggcgaactgcaggattatgtgcaccaggacctgagaaagtttctccctgcactggccgaagaagtccaaattcacttggtcgaagctctgcccatcgttttgaatatgttcgagaaaaagctgagcagctacgcgcaatcacatttagaaaacacttcgatcaaagtacatctgagaacggccgtcgccaaagtggaagaaaagcaattgttggccaagacgaagcacgaagacggtaagataaccgaagaaactatcccatacggtactttgatttgggccacgggtaacaaggcaagaccggtaatcacagaccttttcaagaaaattcctgagcaaaactcgagcaagcggggcctggcagtgaatgactttttgcaagtgaaaggcagcaacaacatcttcgccattggcgacaacgcatttgctgggttgccaccaaccgcccaagtggcgcaccaagaggccgaatatctggccaagaacttcgataaaatggcccagataccaaatttccaaaagaacctatcctcaagaaaggataaaatcgatctcctgttcgaggagaacaactttaaacccttcaaatacaacgatttaggtgccttagcatacctgggatccgaaagagccattgccaccataagaagcggcaagagaaccttctacaccggcggtggcttaatgaccttctacctgtggagaatcttgtacatgagcatgattctgtctgcaagaagcagattaaaggtctttttcgactggatcaaactggcatttttcaagagggacttcttcaaaggattatga

SEQ ID NO: 871 - DNA, 1542 bp, Artificial Sequence
  source: /note="Description of Artificial Sequence: Synthetic polynucleotide"
atgctgtcgaagaatttgtatagtaacaagaggctgctcacctcgacgaatacgctagtgagattcgcctccaccagatccaccggcgtggaaaactccggggcaggtcctacatctttcaagaccatgaaaatcattgacccccagcacagcgacaaaccaaacgtgctgatactgggttcgggctggggagctatttcgtttttaaagcacatcgacaccaagaagtacaacgttagcatcatctctcctagaagctatttcatctttacgcccttgttacctagcgcaccagttggaacagtagacgagaagtcaattatcgagcccatcgttaatttcgccctcaagaaaaagggcaacgttacctactacgaggccgaggccacctctatcaaccccgaccggaataccgtgaccataaaatcattaagcgccgtttcccagctataccaacctgagaaccacctagggctgcatcaggcagagcccgctgaaattaagtacgactatttaatcagcgctgtaggcgcggaacccaacacatttggtatccccggggtcactgattacggtcatttcctgaaggaaattcccaactctttggaaataagaagaacctttgccgccaatctggaaaaggctaacttattgcctaagggtgatcccgagcggagaagactactgtccatcgtcgtggttggtggtgggcctactggcgtagaggctgctggtgaactacaggattatgttcaccaggacctgagaaagtttctccctgcactggccgaagaagtccaaattcacctggtggaagccctgcccatcgtgctgaatatgtttgagaaaaagctgtcatcatacgcgcaaagccacttagaaaacacttcgatcaaagtacatctgagaacggccgtcgccaaggttgaagaaaagcaattgctggcaaagacgaaacacgaagacggtaaaattaccgaagaaactattccatacggtaccttgatttgggccaccggtaacaaggcaagacccgtaatcaccgaccttttcaagaaaattcctgagcaaaactcgagcaagcggggattggccgtgaatgacttcctgcaagtgaaaggcagcaacaacattttcgccatcggcgacaatgcatttgctgggttgcctcctacagcccaagtggcgcaccaagaggccgaatatttggccaagaactttgataagatggcccaaataccaaatttccaaaagaacctgtcttcaagaaaggataaaatcgatctgttgttcgaggagaacaacttcaagcctttcaagtacaacgatttaggtgccttagcctacctgggctccgaaagagccattgcaaccataagatccggtaagagaacattttacaccggcggaggcttaatgaccttctacttatggcggattatctacatgagcatgattctaagcgccagatcgagattaaaggtctttttcgactggattaagttagcatttttcaaaagggacttttttaagggattatga

SEQ ID NO: 872 - DNA, 1542 bp, Artificial Sequence
  source: /note="Description of Artificial Sequence: Synthetic polynucleotide"
atgctatcgaagaacctgtatagcaacaagaggttgctcacctcgacgaataccctcgtccgcttcgctagcaccagatccacaggcgtggaaaacagcggagctggtcccacctcttttaagaccatgaaaatcattgaccctcagcacagcgacaaaccaaacgtgctgatcctgggttcggggtggggagctattagctttttaaagcacattgacaccaagaagtacaacgtttccatcgtgagccctagaagctatttcttattcacgcccttgttaccttctgcaccagttgggaccgtagacgagaagtcaattattgagcccatcgttaattttgccctcaagaaaaaggggaacgtcacctactatgaggcagaagccaccagcatcaatcccgaccggaataccgttaccatcaaaagcttaagcgccgtgagccagctataccaacccgaaaaccacctaggcctgcatcaggcagaacctgctgaaattaagtacgattatctgatcagtgctgtaggcgcggaacccaacacatttggtattcctggcgtcactgattacggtcacttcctgaaagaaattcccaacagcttggaaatccggcggacttttgccgccaatctagagaaggccaacctgttgccaaagggtgaccccgaaagaagaagactactgagcatcgtggtggttggtggtgggcccactggtgtagaggctgctggtgaactacaggactacgtgcaccaggacctgagaaagtttctgcctgcattggccgaggaagtccaaattcacctggtggaagccctgcccatcgttttgaatatgtttgagaagaagcttagctcatacgcgcaatcacacctggaaaacacttcgatcaaagtacacctgagaacggctgtcgccaaagttgaagaaaagcagttgctggcaaagacgaaacacgaagacggtaaaattaccgaagaaactatcccatacggcactctgatttgggccacgggcaacaaggccagaccggtaatcacagaccttttcaagaaaatccctgagcaaaactcgtccaagagaggattggcagtgaatgactttctgcaagtgaaaggcagcaacaacattttcgccattggtgacaatgcatttgctggcttgccaccaaccgcccaagtggcgcaccaagaagccgaatatttggccaagaatttcgataaaatggcccaaataccaaatttccaaaagaatctatcctcaagaaaggataaaatcgatctgttgttcgaggagaacaactttaaacctttcaaatacaacgacctgggtgccttagcatacctgggaagcgaaagggccattgcaaccataagaagcggtaagagaaccttctacaccggcggaggcctgatgaccttctacttatggagaatcatctacatgtccatgattctatctgcccgcagcagattaaaggtgtttttcgactggattaaattagcctttttcaaaagggacttctttaagggcttatga

SEQ ID NO: 873 - DNA, 1542 bp, Artificial Sequence
  source: /note="Description of Artificial Sequence: Synthetic polynucleotide"
atgctatcgaagaatttgtatagtaacaagcggctgctcacctcgacgaataccctcgtccgcttcgctagcaccagatccacaggggtggaaaactccggagcaggtcctacatctttcaagaccatgaaagtcatcgaccctcagcacagcgacaagccaaacgtgctgatcctgggttcgggctggggagctattagctttttaaagcacatcgacaccaagaagtacaacgtttccatcatctctcctagaagctacttcatctacacccctttgttaccttctgcaccagttgggacagtagacgaaaagtcaattattgagcccatcgttaactttgccctgaagaaaaaggggaacgttacctactatgaggcagaagccacctctatcaatcccgacaggaataccgttaccatcaaatcactgtctgccgttagccagctataccaacctgaaaaccatctagggctgcatcaagcagaacccgccgagattaagtacgattacttaatcagtgctgtaggcgcggaacctaacacatttggaattcccggggtgactgattacggtcacttcctgaaggaaatccccaactctctggaaatcagacggacttttgccgccaacctagagaaggctaacctgttgcctaagggtgatcccgaaagaagaaggctactgtccatcgtggtggttggtggtgggcctacaggtgtggaggctgctggcgaactacaggactatgttcaccaggacctgcggaagtttctccctgcattggccgaggaaatccaaattcacttggtggaagctctgcccatcgttttgaatatgttcgagaagaagctttcatcatacgcccagagccatctggaaaacacttcgatcaaggtgcatctgagaaccgctgtcgccaaggttgaagaaaagcaattgctggcaaagacgaaacacgaggacggtaaaattaccgaggaaactattccatacggtaccctgatttgggccacgggcaacaaggcaagaccggtaatcacagacctgttcaagaagattcctgagcaaaactcgagcaagagaggcttggcagtgaatgactttctgcaagtgaaaggcagcaacaacattttcgccattggcgacaatgcatttgctgggttgccaccaacagcccaggtggcccaccaagaagccgaatatctggccaagaatttcgataagatggcccagatcccaaatttccaaaagaacctgtcttcaagaaaggataaaatcgatctcttgttcgaggagaacaactttaaacccttcaaatacaacgacttaggcgccttagcatacctgggctccgaaagggccattgcaaccataagatccggtaagagaacattctacaccggcggtggcttaatgaccttctacctgtggagaattctgtacatgtccatgattctaagcgccagaagcagattaaaggtgtttttcgactggattaaattagcatttttcaaaagggacttttttaaaggactgtag

SEQ ID NO: 874 - DNA, 1542 bp, Artificial Sequence
  source: /note="Description of Artificial Sequence: Synthetic polynucleotide"
atgctaagcaagaatttgtatagtaacaagaggttgctcacctcgaccaacacgctcgtccgcttcgcttccaccagatccacaggggtggaaaactccggagctggccctacatctttcaagaccatgaagatcattgacccccagcacagcgacaagccaaacgtgctgatcctgggttcggggtggggagctatctcgtttttaaagcacattgacaccaagaagtacaacgtctccatcgtgagccctagaagctatttcatctttacccctttgttacctagcgcccctgttggaacagtagacgagaagtcaattattgagcccatcgtgaactttgctctcaagaaaaaggggaacgttacctactacgaggcagaagccacctctatcaaccccgaccggaataccgttaccataaagagcttatctgccgtgtcccagctataccaacccgaaaaccatctgggcctgcatcaagcagaacccgccgagattaagtacgactatttaatcagtgctgtgggtgccgaacccaacacatttggaattcctggggtcactgactacggccatttcctgaaggaaattcccaactctttggaaatccggcggacttttgccgccaatctagaaaaggctaacttactgccaaagggtgatcccgagcggagaagactgctgtccattgtcgtcgttggtggtgggcctactggtgtagaggccgctggtgaactgcaggattatgttcaccaggacctgcggaagtttctccctgcactggccgaagaaatccaaattcacctggtcgaagccctgcccatcgtgttgaatatgtttgagaagaagctttcaagctacgcccaatcacatttagaaaacacttcgatcaaagtacatctgagaaccgccgtcgccaaagtggaagaaaagcaattgttggcaaagacgaagcacgaagacggcaaaataaccgaagaaaccattccatacggtactttgatttgggccaccggtaacaaggcaagacccgtaatcacagaccttttcaagaagattcctgagcaaaacagcagcaagagaggcttggcagtgaacgactttctgcaggtgaaaggcagcaacaacattttcgccattggtgacaacgcctttgctgggttgcctcctaccgcccaggtggcgcaccaagaggccgaatatttggccaagaattttgacaaaatggctcaaatcccaaatttccagaagaatctgtcctcacggaaggataaaattgatctcttgttcgaggagaacaactttaagcctttcaagtacaacgatttaggtgccttagcctacctgggcagcgaaagagccattgccaccatacgttccggtaagagaacattttacaccggtggtggcctgatgaccttctacttatggagaattttgtacttgagcatgatcctaagcgcaagatcgagattaaaggtgtttttcgactggattaaattagcatttttcaaaagagacttttttaaaggattatag

SEQ ID NO: 875 - DNA, 1542 bp, Artificial Sequence
  source: /note="Description of Artificial Sequence: Synthetic polynucleotide"
atgctatcgaagaatttgtatagtaacaagaggttgctgaccagcaccaatacgctcgtgcgcttcgctagcaccagatccaccggggtggaaaactccggggcaggccccacaagctttaagaccatgaaaatcatcgacccccagcacagcgacaaaccaaacgtgctgatactgggttctggctggggagccatttcgtttttaaagcacattgacaccaagaagtacaacgtttccatcgtgtctcccagaagctatttcatctttacgcctttgttaccttctgcaccagtggggaccgtagacgaaaagtccatcattgagcccatcgttaatttcgctctcaagaaaaaggggaacgttacctactatgaggccgaagccacctctatcaatcccgaccggaataccgttaccataaaatcactgtctgccgtgagccagctgtaccaacctgagaaccatctaggcctgcatcaagcagaacccgctgagattaagtacgattatttaatcagcgctgtaggtgccgagcctaacacatttggaatccctggggtgaccgattacggccacttcctgaaggaaatccccaactctttggaaatcagacggactttcgccgccaatctggagaaggctaacctgttgccaaagggcgatcccgaaagaagaagactactgtccatcgtcgtggtgggcggtgggcctactggcgtagaagccgctggtgagctacaggactatgttcaccaggacctgagaaagtttctccctgccttggccgaagaagtccagattcacttggtggaagctctgcccatcgttttgaatatgtttgagaaaaagctttcaagctacgcgcagtcacatttagaaaacacttcgatcaaagtgcatctgagaaccgctgtcgccaaggttgaagagaagcaattgctggccaagacgaaacacgaggacggtaaaataaccgaagaaactattccatacggtactttgatttgggccacgggtaacaaggcaagaccggtaatcacagaccttttcaagaagattcctgagcagaactcgtccaagcggggactggcagtgaacgactttttgcaagtcaaaggcagcaacaacattttcgccattggcgacaatgcatttgccgggttgccaccaaccgcccaagtggcgcaccaggaggccgaatacttggccaagaactttgacaagatggctcaaatccccaatttccaaaagaatctgtcttcaagaaaggataagattgatctcttgttcgaggaaaacaactttaaacctttcaaatacaacgatttaggcgccttagcatacctgggaagcgaaagggccattgcaaccatacgttccggtaagagaaccttctacaccggtggaggcttaatgaccttctacctgtggagaattatctacatgagcatgattctgtctgcaagatcgagattaaaggtctttttcgactggattaaattagccttcttcaaaagagacttcttcaaaggattatag

SEQ ID NO: 876 - DNA, 1542 bp, Artificial Sequence
  source: /note="Description of Artificial Sequence: Synthetic polynucleotide"
atgctgtcgaagaatttgtatagtaacaagcggctgctcacctcgacgaatacgctagtccgcttcgcttccaccagatccaccggggtggaaaactccggagcaggtcctaccagctttaagaccatgaaaatcattgaccctcagcacagcgacaaaccaaacgtgctgatactgggttcgggctggggagctattagctttttaaagcacatcgacaccaagaagtacaacgttagcatcgtgagccctagaagctatttcctgtacacgcctttgctgcccagcgcaccagttgggacagtagacgagaagtccatcatcgagcccatcgttaacttcgctctcaagaaaaagggcaacgttacctactacgaggccgaagccacctctatcaatcccgacaggaacaccgttaccatcaagtcattatctgccgttagccagctataccaacctgaaaaccatctgggcctgcaccaagccgaacctgccgaaattaagtacgactacttaatcagtgctgtaggtgccgagcctaacacatttggtattcctggcgtcactgattacggtcatttcctgaaagagattcccaactctttggaaatacggagaacttttgccgccaatctggagaaggctaacctgctgccaaagggtgaccccgaaagaagaaggctactgtccatcgtcgtcgtgggtggtggccctactggtgtagaggccgctggtgaactacaggattatgttcaccaggacctgagaaagttcctccccgcattggccgaggaaatccaaattcacctggtcgaagccctgcccatcgttttgaatatgtttgagaaaaagcttagctcatacgcgcagtcacatttagaaaacacttccatcaaagtgcatctgagaacggctgtcgccaaggttgaagaaaagcaactgttggcaaagacgaaacacgaagacggtaaaataaccgaagaaactattccctacggtactttgatttgggccacgggtaacaaggccagaccggtgatcacagaccttttcaagaagatccctgagcaaaacagcagcaagagaggcttggcagtgaacgacttcctgcaagtcaaaggcagcaacaacattttcgccattggcgacaatgcatttgctgggttgcctcctaccgcccaggtggcgcaccaagaggccgaatacctggccaagaatttcgataaaatggcccaaataccaaatttccagaagaatctatcttcaagaaaggataagattgatctgttgttcgaggagaacaactttaagcctttcaaatacaacgatttaggtgccttagcatacctgggatccgaaagggccattgcaaccatacgttccggcaagcggaccttttacaccggtggtggcttaatgaccttctacttatggagaatcatctacctgtccatgatcctatctgcaagatcgagactgaaggtctttttcgactggattaaactggcctttttcaagagagactttttcaagggcttatag

SEQ ID NO: 877 - DNA, 1542 bp, Artificial Sequence
  source: /note="Description of Artificial Sequence: Synthetic polynucleotide"
atgctaagcaagaatctgtatagcaacaagaggttgctcacctcgacgaatacgctcgtcagattcgcctccaccagatccacaggcgtcgaaaactccggagctggtcctacaagcttcaagaccatgaaaatcattgaccctcagcacagcgacaaaccaaacgtgctgatactgggttcggggtggggagccattagctttttaaagcacattgacaccaagaagtacaacgtctccatcgtgtctcctagaagctatttcatctacacgcctttgttaccctctgcaccagttggaacagtggacgagaagtcaattattgagcccatcgttaattttgccctcaagaaaaaggggaacgttacctactatgaggcagaggccacctctatcaaccccgaccggaataccgttaccataaagtcactgtctgccgtgtcccagctgtaccagcctgaaaaccatctaggcctgcatcaagcagagcccgccgagattaagtacgattatttaatcagtgctgtaggtgccgagcctaacacatttggtatccctggggtcactgattacggtcacttcctgaaggagatccccaacagcctggaaataagaagaactttcgccgccaatctagaaaaggctaacttattgcctaagggcgatcccgaaagaagaagactgctgtccatcgtggtcgttggtggtgggcctacaggtgtggaggctgctggtgagctacaggactacgtgcaccaggacctgagaaagtttctgcctgcattggccgaagaaatccaaattcacttggtcgaagccctgcccatcgttttgaatatgtttgagaagaagctttcatcatacgcccaaagccatttagaaaacacttccatcaaagtacatctgagaacggctgtggccaaagttgaagagaagcaattgttggcaaagacgaaacacgaggacggcaaaattaccgaagaaactattccatacggtaccttgatttgggccacgggtaacaaggcaagaccggtgatcacagacctgttcaagaaaattcctgagcaaaactcgtccaagagaggattggcagtgaatgacttcttgcaagtcaaaggcagcaacaacattttcgccatcggtgacaacgcatttgctgggttgcctccaacagcccaagtggcgcaccaagaagccgaatacttggccaagaatttcgataagatggctcaaatccccaatttccagaagaatctatcttcccggaaggataaaattgacctcttgttcgaggagaacaactttaaacctttcaaatacaacgacctgggtgccttagcctacctgggatccgaaagggccattgcaaccatccgttccggtaagagaacattttacaccggcggtggcctgatgaccttctacctgtggagaattctgtacttgtccatgatcctatctgcaagatcgagattaaaggtgttcttcgactggattaaattagcattcttcaaaagagactttttcaagggattatag

SEQ ID NO: 878 - DNA, 1542 bp, Artificial Sequence
  source: /note="Description of Artificial Sequence: Synthetic polynucleotide"
atgctaagcaagaacttgtatagtaacaagaggttgctgaccagcaccaatacgctcgtgagattcgctagcaccagatccacaggcgtcgaaaactccggagcaggtcccacctctttcaagaccatgaaaatcattgaccctcagcacagcgacaagcccaacgtgctgatactgggttctggctggggcgctatctcgtttttaaagcacatcgacaccaagaagtacaacgtttccatcatctctcccagaagctatttcatctacacgcctttgttaccctctgcaccagttgggacagtagacgagaagtcaatcattgagcccatcgttaatttcgccctcaagaaaaagggcaacgttacctactacgaggcagaggccacctctatcaatcccgacaggaataccgtgaccataaagtcactgtctgccgttagccagctataccaacctgagaaccatctaggcctgcatcaagccgaacctgctgaaattaagtacgattatctgatcagcgctgtgggtgcggagcctaacacatttggtattcctggggtgactgattacggtcatttcctgaaggagattcccaactctttggaaatccggcggaccttcgccgccaatctggagaaggctaacctgttgcctaagggtgatcccgaacggagaaggctactgtccatcgtcgtggttggtggtgggcccactggtgtagaggccgctggtgaactacaggactatgtgcaccaggacctgagaaagtttctccccgcattggccgaagaagtccaaattcacttggtcgaagctctgcccatcgttttgaatatgtttgagaaaaagctttcatcatacgcccaaagccatttagaaaacacttcgatcaaagtacatctgagaaccgctgtggccaaggttgaagaaaagcaattgctggcaaagacgaaacacgaagacggcaaaattaccgaagaaactatcccatacggtactttgatttgggccacgggtaacaaggccagacccgtaatcacagaccttttcaagaaaatccctgagcaaaacagcagcaagagaggactggcagtgaatgactttctgcaagtgaaaggcagcaacaacattttcgccattggtgacaacgcctttgctgggctgccaccaacagcccaagtggcccaccaagaggccgaatatttggccaagaactttgataaaatggctcagataccaaatttccaaaagaacctgtcctcccggaaggataaaattgatctcttgttcgaggagaacaacttcaaacccttcaagtacaacgatttaggtgccctggcatacctgggctccgaaagggccattgcaaccatccgttccggcaagagaacattctacaccggtggtggcttaatgaccttctacttatggagaattatctacatgagcatgattctgtctgcacgcagcagattaaaggtctttttcgactggatcaaattagcatttttcaaaagagacttttttaagggattatag

SEQ ID NO: 879 - DNA, 1542 bp, Artificial Sequence
  source: /note="Description of Artificial Sequence: Synthetic polynucleotide"
atgctgtcgaagaatttgtatagtaacaagaggttgctcacctcgaccaataccctagtccgcttcgcttccaccagatccacaggcgtcgaaaacagcggagcaggtcctacatcttttaagaccatgaaaatcattgaccctcagcacagcgacaaaccaaacgtgctgatactgggttctggctggggagctatttcgtttctgaagcacatcgacaccaagaagtacaacgttagcatcgtgtctcccagaagctacttcatcttcacgcccctgttacctagcgccccagtggggacagtagacgaaaagtcaattattgagcccatcgttaatttcgctctcaagaaaaaggggaacgtcacctactatgaggccgaagccacctctatcaatcccgacaggaataccgtgaccatcaagtcattatctgccgtgagccagctgtaccagcccgaaaaccacctagggctgcaccaagcagaacctgctgaaattaagtacgattacttaatcagtgctgtaggtgcggaacctaacacatttggtatccctggggtcactgactacggtcatttcctgaaggaaatccccaactctctggaaatacggagaactttcgccgccaatctagagaaggctaacttattgcctaagggcgatcccgaacggagaagactgctgtccatcgtggtggttggtggtgggcctactggtgtagaagccgctggtgaactgcaggattatgtgcaccaggacctgagaaagtttctccctgcattggccgaagaagtccaaattcacttggtggaagctctgcccatcgttctgaatatgttcgagaagaagctttcatcatacgcccaatcacatctggaaaacacctccatcaaagtacatctgagaaccgccgtcgccaaggttgaagagaagcaattgctggccaagacgaaacacgaggacggtaagataaccgaagaaaccattccatacggtactctgatttgggccacgggtaacaaggcaagacccgtaatcacagacctgttcaagaagattcctgagcaaaactcgagcaagagaggattggcagtgaatgactttttgcaggtgaaaggcagcaacaacattttcgccattggtgacaatgcatttgccggcttgccacctaccgcccaagtggcccaccaagaggccgaatatctggccaagaatttcgacaaaatggctcaaatccccaatttccaaaagaatctatcttcacggaaggataaaatcgatctcttgttcgaggagaacaactttaagcctttcaagtacaacgacttaggcgccttagcatacctgggatccgaaagggccattgcaaccatccgttccggtaagagaacattttacaccggtggaggcttaatgaccttctacttatggcggatcatctacatgtccatgattctatctgcaagaagcagactgaaggtctttttcgactggatcaaactggcatttttcaagagagacttcttcaagggcttatag

SEQ ID NO: 880 - DNA, 1542 bp, Artificial Sequence
  source: /note="Description of Artificial Sequence: Synthetic polynucleotide"
atgctatcgaagaatttgtatagtaacaagaggttgctgacctcgacgaataccctagtccgcttcgcttccaccagatccacaggggtggaaaacagcggggcaggtcctacatctttcaagaccatgaaaatcattgaccctcagcacagcgacaagccaaacgtgctgatactgggttcggggtggggagctattagctttctgaagcacattgacaccaagaagtacaacgtctccatcgtgtctcctagaagctatttcatctacacgcctttgctgccttctgcaccagttgggaccgtggacgaaaagtcaatcattgagcccatcgttaacttcgctctcaagaaaaaggggaacgtcacctactatgaggcagaagccacctctatcaatcccgacaggaataccgttaccataaaaagcttatctgccgtgagccagctataccagcctgaaaaccatctagggctgcatcaagcagagcctgctgaaattaagtacgactacttaatcagtgccgtgggtgcggaacctaacacatttggtatccctggcgtgaccgattacggccacttcctgaaggagatccccaacagcttggaaatcagaagaacctttgccgccaatctagagaaggctaacctgctgccaaagggcgaccccgagcggagaagactgctgagcattgtggtggtgggtggaggccccactggtgtagaggccgctggtgagctacaggattatgttcaccaggacctgagaaagtttctccctgcattggccgaagaagtccagattcacctggtcgaagccctgcccatcgttttgaacatgttcgagaagaagctttcatcatacgcgcaatcacatttagaaaacacttcgatcaaggtacatctgagaacggccgtggccaaagttgaagagaagcagttgttggccaagacgaaacacgaggacggtaaaataaccgaagaaactattccatacggcactttgatttgggccaccggtaacaaggcaagaccggtaatcacagaccttttcaagaagattcctgagcaaaactcgtccaagagaggattggcagtgaatgacttcttgcaggtcaaaggcagcaacaacatcttcgccatcggtgacaatgcatttgctgggttgcctccaacagcccaagtggcccaccaagaggccgagtacctggccaagaactttgacaaaatggctcaaataccaaatttccaaaagaatctgtcctccagaaaggataaaatcgatctcttgttcgaggagaacaacttcaagcccttcaaatacaacgatttaggtgccttagcctacctgggctccgaaagggccattgcaaccatacgtagcggtaagcggacattttacaccggcggtggcctgatgaccttctacttatggagaatcttgtacatgagcatgattctaagcgcaagatcgagattaaaggtgtttttcgactggattaaattagcctttttcaaaagagactttttcaaaggattatga

SEQ ID NO: 881 - DNA, 1542 bp, Artificial Sequence
  source: /note="Description of Artificial Sequence: Synthetic polynucleotide"
atgctatcgaagaatctgtatagtaacaagaggttgctgacctcgacgaacacgctagtcagattcgcctccaccagatccacaggggtggaaaacagcggagctggtcctacatcttttaagaccatgaaaatcatcgacccccagcacagcgacaaacccaacgtgctgatactgggttcgggctggggcgccattagctttttaaagcacattgacaccaagaagtacaacgtttccatcatcagccctagaagctatttcttatacacgcccctgctgccttctgccccagtgggaacagtagacgaaaagtcaattattgagcccatcgttaactttgctctcaagaaaaagggcaacgttacctactacgaggcagaagccacctctatcaatcccgacaggaacaccgttaccataaaatcactgtctgccgttagccagctataccaacccgaaaaccacctagggctgcaccaagcagagcccgccgaaattaagtacgattatttaatcagtgccgtaggtgcggagcctaacacatttggtattcctggggtcactgattacggtcatttcctgaaagaaattcccaactctctggaaataagacggacctttgccgccaacctagaaaaggccaacttattgccaaagggtgatcccgaaagaagaagactactgtccatcgtcgtggttggtggaggccctactggcgtggaggccgctggtgagctacaggactatgttcaccaggacctgagaaagtttctgcctgcattggccgaagaaatccaaattcacttggtcgaagccctgcccatcgttttgaatatgtttgagaagaagcttagcagctacgcgcaatcacatttagaaaacacctcgatcaaagtgcacctgagaacggccgtcgccaaagttgaagaaaagcagttgctggcaaagaccaagcacgaagacggtaaaataaccgaagaaactattccatacggcaccttgatttgggccacgggcaacaaggcaagacccgtaatcacagaccttttcaagaagattcccgagcagaacagctccaagagaggattggcagtgaatgactttttgcaagtgaaaggcagcaacaacatcttcgccatcggtgacaatgcctttgctgggttgcctcctaccgcccaagtggcgcaccaagaggccgagtacttggccaagaacttcgacaagatggctcaaatcccaaatttccaaaagaacctatcttcaagaaaggataagattgatctcttgttcgaggaaaacaactttaaacccttcaaatacaacgatttaggcgccttagcatacctgggatccgaaagggccattgccaccatccgtagcggtaagagaaccttttacaccggtggtggcttaatgaccttctacctgtggagaatcatctacatgtccatgatcctgtctgccagatcgagactgaaggtctttttcgactggattaagttagcatttttcaagagggacttttttaaaggcttatag

SEQ ID NO: 882 - DNA, 1542 bp, Artificial Sequence
  source: /note="Description of Artificial Sequence: Synthetic polynucleotide"
atgctatcgaagaatttgtacagcaacaagaggctgctcacctcgacgaatacgctcgtcagattcgctagcaccagatccacaggggtggaaaactccggagcaggtcctacctcttttaagaccatgaaggtcattgaccctcagcacagcgacaaacccaacgtgctgatcctgggctcggggtggggcgccatctcgtttttaaagcacattgacaccaagaagtacaacgtctccatcgtgagccccagaagctatttcatctacacccctctgttaccttctgccccagtgggaacagtagacgaaaagtccattattgagcccatcgttaattttgctctcaagaaaaaggggaacgtcacctactatgaggccgaagccaccagcatcaatcccgacaggaataccgttaccataaaatcattatctgccgtttcccagctgtaccaacctgaaaaccatctaggcctgcatcaagccgaacccgccgaaattaagtacgactatttaatcagtgctgtaggtgccgaacctaacacatttggtatccctggcgtcaccgactacggccacttcctgaaggaaatccccaacagcttggaaatacggagaaccttcgccgccaatctagaaaaggccaacctgttgccaaagggcgatcccgagagaagaaggctgctgagcattgtggtcgttggtggtgggcctactggtgtggaagccgctggcgaactacaggattatgttcaccaggacctgagaaagtttctccctgcattggccgaagaaatccagattcacctggtcgaagctctgcccatcgttttgaatatgtttgagaaaaagctttcatcatacgcgcaatcacatctggaaaacacttcgatcaaagtgcacctgagaacggctgtggccaaagttgaagagaagcaattgttggcaaagaccaaacacgaggacggtaagataaccgaagaaactattccatacggtactctgatttgggccaccggcaacaaggcaagaccggtaatcacagaccttttcaagaaaattcccgagcaaaactcgtccaagcggggattggcagtgaacgactttttgcaagtcaaaggcagcaacaacatcttcgccattggtgacaatgcatttgctgggttgcctcctaccgcccaggtggcccaccaagaagccgagtatttggccaagaacttcgataaaatggctcaaataccaaatttccaaaagaatctatcttcaagaaaggataaaattgatctcttgttcgaggaaaacaactttaagcctttcaaatacaacgacttaggtgccctggcatacctgggatccgaaagggccattgcaaccatacgttccggcaagagaacattttacaccggcggtggcctgatgaccttctacttatggagaattatctacttgtccatgattctatctgcccgcagcagactgaaggtctttttcgactggattaaattagcattcttcaaaagagacttcttcaaaggcctgtag

SEQ ID NO: 883 - DNA, 1542 bp, Artificial Sequence
  source: /note="Description of Artificial Sequence: Synthetic polynucleotide"
atgctaagcaagaatctgtatagtaacaagaggctgctcaccagcacgaatacgctagtcagattcgctagcaccagatccacaggcgtggaaaacagcggagcaggtcctacatctttcaagaccatgaaagtcatcgaccctcagcacagcgacaagcccaacgtgctgatactgggttcggggtggggagccatttcgtttttaaagcacattgacaccaagaagtacaacgtttccatcgtgtctcctagaagctatttcatctacacgcctctgttacccagcgcaccagtggggacagtggacgagaagtcaattattgagcccatcgttaatttcgctctcaagaaaaaggggaacgttacctactatgaggcagaagccacctctatcaatcccgacaggaataccgttaccataaagtcattatctgccgttagccagctataccagcctgaaaaccatctggggctgcaccaagcagagcctgctgagattaagtacgactatttaatcagcgccgtaggcgcggaacccaacacatttggtatccccggcgtcactgactacggtcacttcctgaaggaaattcccaacagcctggaaatccggagaacttttgccgccaacctggaaaaggctaacctgttgcctaagggcgatcccgagcggagaagactactgtccatcgtggtggtgggcggtggccctactggtgtggaggccgctggcgagctacaggattatgtgcaccaggacctgagaaagtttctccctgccttggccgaagaaatccaaattcacttggtcgaagctctgcccatcgttttgaatatgtttgagaaaaagctgtcatcatacgcgcagagccacttagaaaacacttcgatcaaagtacatctgagaacggctgtggccaaagttgaagaaaagcaattgttggcaaagacgaaacacgaagacggtaagataaccgaagaaactattccctacggcaccctgatttgggccaccggcaacaaggccagaccggtaatcacagaccttttcaagaaaattcctgagcaaaacagctccaagagaggattggcagtgaacgacttcttgcaagtcaaaggcagcaacaacattttcgccattggtgacaacgcatttgctgggttgccacctaccgcccaagtggcccaccaagaggccgaatatttggccaagaactttgacaaaatggctcaaataccaaatttccaaaagaatctatcctccagaaaggataaaatcgatctgctgttcgaggagaacaactttaagcctttcaagtacaacgacctgggtgccttagcatacctgggatccgaaagggccattgcaaccataagatccggcaagagaacattttacaccggtggtggcttaatgaccttctacttatggcggattatctacctgtccatgattctaagcgcaagaagcagattaaaggtgttcttcgactggattaaattagcatttttcaagagggacttttttaaaggattatag

SEQ ID NO: 884 - DNA, 1542 bp, Artificial Sequence
  source: /note="Description of Artificial Sequence: Synthetic polynucleotide"
atgctatcgaagaacctgtacagtaacaagaggttgctcacctcgacgaatacgctagtgcgcttcgcttccaccagatccacaggcgtggaaaacagcggagcaggccccacatcttttaagaccatgaaaatcattgacccccagcacagcgacaaaccaaacgtgctgatactgggttcggggtggggcgctattagctttttaaagcacatcgacaccaagaagtacaacgtttccatcatctctcctagaagctatttcatctacacgcctttgctgccctctgcaccagttgggacagtagacgaaaagtcaatcattgagcccatcgtgaacttcgctctcaagaaaaagggcaacgtcacctactatgaggccgaagccacctctatcaaccccgacaggaacaccgttaccatcaaatcactgagcgccgtgagccagctataccaacctgagaaccatctggggctgcatcaggcagaacctgctgaaattaagtacgattatttaatcagtgctgtaggcgcggaacctaacacatttggtatccctggcgtcaccgattacggccacttcctgaaggaaattcccaacagcttggaaatcagaagaacttttgccgccaatctggagaaggctaacctgttgccaaagggcgatcccgaaagaagaagactgctgtccatcgtcgtggtgggtggaggccctactggtgtagaagctgctggtgaactgcaggattatgttcaccaggacctgagaaagtttctccctgccttggccgaagaaatccaaattcacttggtcgaagctctgcccatcgttttgaatatgtttgagaaaaagctttcatcatacgcgcagtcacatctggaaaacacttcgatcaaagtacatctgagaacggccgtcgccaaggttgaagaaaagcagttgttggcaaagacgaaacacgaagacggcaagataaccgaggaaactattccatacggcactctgatttgggccacgggcaacaaggcaagaccggtaatcacagaccttttcaagaaaattcctgagcaaaacagcagcaagcggggattggccgtgaatgacttcttgcaagtgaaaggcagcaacaacattttcgccatcggtgacaacgcatttgccggcttgcctccaaccgcccaagtggcccaccaagaggccgaatatttggccaagaactttgataaaatggcccagatacccaatttccagaagaacctatcttccagaaaggataagattgatctcttgttcgaggagaacaactttaaacccttcaaatacaacgatctgggtgccctggcatacctgggatccgaaagagccattgccaccatccgttccggtaagcggaccttctacaccggtggtggcctgatgaccttctacttatggagaattatctacttgagcatgattctatctgccagaagcagattaaaggtcttcttcgactggattaaattagcattcttcaaaagagacttctttaagggactgtag

SEQ ID NO: 885 - DNA, 1542 bp, Artificial Sequence
  source: /note="Description of Artificial Sequence: Synthetic polynucleotide"
atgctaagcaagaacttgtacagcaacaagcggctgctgaccagcaccaataccctcgtgcgcttcgctagcaccagatccacaggcgtggaaaactccggggctggtcccaccagcttcaagaccatgaaggtcatcgacccccagcacagcgacaaaccaaacgtgctgatactgggctcgggctggggagccattagctttctgaagcacatcgacaccaagaagtacaacgtttccatcatcagccccagaagctacttcctgttcacgcccttgctgccctctgcacctgttgggaccgtagacgagaagtccattattgagcccatcgttaacttcgccctgaagaaaaagggcaacgtcacctactatgaggccgaagccaccagcatcaatcccgacaggaacaccgttaccataaagagcctgagcgccgtgtcccagctgtaccagcctgaaaaccacctggggctgcatcaagccgagcccgccgagattaagtacgactacctgatcagcgccgtgggtgcggaacccaacacctttggaattcccggggtcaccgactacggtcacttcctgaaagagattcccaactctctggaaatccggcggacctttgccgccaacctggagaaggctaacctgctgccaaagggtgaccccgagcggagaaggctgctgtccattgtcgtggttggtggagggcccactggtgtagaagccgctggcgagctgcaggactatgtgcaccaggacctgcggaagttcctgcccgcactggccgaggaagtgcagattcacttggtcgaagccctgcccatcgtgttgaatatgttcgagaagaagctgtcatcatacgcgcagagccatctggaaaacacctccatcaaagtgcatctgagaacggccgtggccaaagttgaagaaaagcagctgctggccaagacgaaacacgaggacggcaagattaccgaggaaactatcccctacggtaccctgatttgggccaccggtaacaaggcaagaccggtgatcacagaccttttcaagaaaattcctgagcagaacagcagcaagagaggcctggccgtgaatgacttcttgcaggtgaaaggcagcaacaacattttcgccattggcgacaatgcctttgccggcttgccacctacagcccaggtggcgcaccaggaggccgagtacctggccaagaattttgacaagatggctcagatcccaaatttccagaagaacctatcctcaagaaaggataagattgatctcctgttcgaggagaacaacttcaaacccttcaagtacaacgatctgggtgccctggcctacctgggcagcgaaagggccattgccaccatcagatccggcaagcggacattctacaccggtggaggcttaatgaccttctacctgtggagaattttgtacctgagcatgatcctaagcgcacgcagcagactgaaggtgtttttcgactggattaagctggccttcttcaaaagggactttttcaagggcctgtag

SEQ ID NO: 886 - DNA, 1542 bp, Artificial Sequence
  source: /note="Description of Artificial Sequence: Synthetic polynucleotide"
atgctatcgaagaacctgtatagtaacaagcggctgctgacctcgaccaataccctcgtgcgcttcgctagcaccagatccaccggcgtcgaaaactccggggctggccccaccagcttcaagaccatgaaagtcatcgacccccagcacagcgacaagccaaacgtgctgatactgggttcgggctggggcgctatcagctttctgaagcacattgacaccaagaagtacaacgtctccatcatcagccccagaagctacttcttatttacgcctctgttaccctctgcaccagtgggaacagtagacgagaagtcaattatcgagcccatcgtgaatttcgctctgaagaaaaagggcaacgtcacctactacgaggccgaggccacctctatcaaccccgacaggaacaccgttaccatcaagtcactgtctgccgttagccagctataccaacctgagaaccacctggggctgcaccaggccgaacctgctgagattaagtacgattatttaatcagtgctgtgggcgccgagcccaacacatttggaatccccggcgtcaccgattacggccacttcctgaaagaaatccccaacagcttggaaatccggagaaccttcgccgccaacctggaaaaggctaacttactgccaaagggtgaccccgaaagaagaaggctgctgtccatcgtcgtcgtgggtggaggccctactggtgtggaagccgctggcgagctgcaggattatgtgcaccaggacctgcggaagttcctgcctgccctggccgaagaagtgcagattcacctggtcgaagctctgcccatcgttctgaatatgtttgagaagaagctgtcaagctacgcgcaatcacacctggaaaacacctccatcaaagtacatctgagaacggccgtggccaaggttgaagagaagcaactgttggccaagaccaagcacgaggacggcaagattaccgaagaaactatcccctacggcactctgatttgggccaccggtaacaaggccagacccgtgatcaccgacctgttcaagaagatccccgagcaaaacagctccaagcggggcttggccgtgaatgacttcttgcaagtcaaaggcagcaacaacattttcgccatcggcgacaatgcatttgccggcctgccacctacagcccaggtggcgcaccaggaagccgaatatctggccaagaattttgacaaaatggcccagatcccaaatttccagaagaatctgtcctcccggaaggataagattgatctgttgttcgaggaaaacaacttcaaacccttcaagtacaacgacttaggcgccctggcctacctgggcagcgaaagagccattgccaccatcagaagcggcaagcggacattttacaccggtggaggcctgatgaccttctacctgtggagaatcttgtacttgagcatgatcctatctgcacgcagcagactgaaggtctttttcgactggatcaaactggccttcttcaagagagacttctttaagggcctgtag

SEQ ID NO: 887 - DNA, 1542 bp, Artificial Sequence
  source: /note="Description of Artificial Sequence: Synthetic polynucleotide"
atgctaagcaagaacctgtacagcaacaagaggctgctcacctcgacgaacaccctagtccgcttcgccagcaccagatccaccggcgtcgaaaacagcggagcaggtcccacaagctttaagaccatgaaggtcatcgacccccagcacagcgacaaaccaaacgtgctgatcctgggctctgggtggggagccatttcgtttttaaagcacatcgacaccaagaagtacaacgttagcatcatcagccccagaagctatttcctgttcacccctctgttacctagcgcacctgttgggaccgtggacgagaagtccattattgagcccatcgttaatttcgccctcaagaaaaaggggaacgttacctactatgaggccgaagccaccagcatcaatcccgaccggaataccgttaccataaagagcctgagcgccgtgtcccagctgtaccagcctgagaaccacctggggctgcaccaagccgagcccgctgagattaagtacgactacctgatcagtgccgtaggcgcggaacctaacacatttggtattcccggcgtgactgattacggccatttcctgaaggaaatccccaacagcctggaaatccggcggacctttgccgccaacctagaaaaggctaacttactgcctaagggcgaccccgaacggagaagactgctgagcattgtggtcgtgggcggagggcccacaggcgtggaagctgctggtgagctgcaggactatgttcaccaggacctgagaaagtttctccccgccctggccgaagaagtccagattcacctggtggaagccctgcccatcgtgctgaacatgttcgagaaaaagctgtcaagctacgcccaaagccatctggaaaacacctccatcaaggtgcacctgagaaccgccgtggccaaggtggaagaaaagcaactgttggccaagaccaagcacgaggacggcaagataaccgaagaaaccatcccatacggcaccctgatttgggccaccggcaacaaggcaagacccgtaatcaccgacctgttcaagaaaatccctgagcagaactcgtccaagcggggcttggccgtgaacgacttcctgcaggtgaaaggcagcaacaacatcttcgccatcggcgacaatgcctttgccggcctgcctcctacagcccaagtggcgcaccaagaggccgaatatttggccaagaacttcgacaagatggcccagataccaaatttccagaagaatctatcctcacggaaggataagattgacctcctgttcgaggaaaacaactttaaacctttcaaatacaacgatctgggtgccttagcctacctgggcagcgaaagagccattgcaaccatccgttccggtaagcggacattctacaccggtggaggcctgatgaccttctacttatggcggatcttgtacctgagcatgattctgtctgcacgcagcagattaaaggtgtttttcgactggatcaagttagccttcttcaagagggactttttcaaaggcctgtag

SEQ ID NO: 888 - DNA, 1542 bp, Artificial Sequence
  source: /note="Description of Artificial Sequence: Synthetic polynucleotide"
atgctatcgaagaatctgtacagcaacaagcggttgctcaccagcaccaacaccctcgtccgcttcgctagcaccagatccacaggcgtcgaaaactccggggcaggtcctaccagctttaagaccatgaaggtcatcgacccccagcacagcgacaaacccaacgtgctgatcctgggctctggctggggcgctatcagctttctgaagcacattgacaccaagaagtacaacgttagcatcatcagccccagaagctacttcttatttacgcccctgttaccctctgcccctgttgggacagtggacgagaagtcaatcatcgagcccatcgttaactttgccctgaagaaaaagggcaacgttacctactacgaggccgaggccacctctatcaatcccgacaggaataccgtgaccatcaagagcctgagcgccgtttcccagctgtaccagcctgagaaccacctggggctgcaccaggcagaacccgctgaaattaagtacgattatctgatcagcgccgtaggtgccgagcccaacacctttggaattcccggggtgaccgactacggtcatttcctgaaagaaattcccaacagcttggaaataagacggaccttcgccgccaacctggagaaggccaacttattgcctaagggtgatcccgagcggagaaggctgctgagcatcgtggtcgtgggtggtggccccactggtgtggaagctgctggcgaactgcaggactacgttcaccaggacctgcggaagtttctgcccgccctggccgaagaagtgcaaattcacctggtggaagccctgcccatcgtgttgaacatgtttgagaaaaagcttagctcatacgcgcagagccatttagaaaacacctccatcaaggtacacctgagaaccgctgtcgccaaagtggaagaaaagcagttgctggccaagaccaagcacgaggacggtaagataaccgaagaaactattccctacggcactttgatttgggccaccggtaacaaggccagaccggtgatcacagacctgttcaagaagattcctgagcagaacagcagcaagcggggcttggccgtgaatgacttcctgcaagtcaaaggcagcaacaacatcttcgccatcggcgacaacgcatttgctgggctgccacctaccgcccaagtggcccaccaggaagccgaatacctggccaagaatttcgataaaatggcccaaatccccaatttccagaagaacctgtcttccagaaaggataagatcgacctgctgttcgaggaaaacaacttcaagcccttcaaatacaacgatttaggtgccctggcctacctgggcagcgaaagagccattgccaccatacgtagcggtaagcggaccttttacaccggtggaggcctgatgaccttctacctgtggagaatcttgtacctgagcatgatcctgtctgcccgcagcagactgaaggtctttttcgactggattaaattagcattcttcaaaagggactttttcaaaggcctgtga

SEQ ID NO: 889 - DNA, 1542 bp, Artificial Sequence
  source: /note="Description of Artificial Sequence: Synthetic polynucleotide"
atgctgagcaagaacttgtacagcaacaagaggttgctgacctcgacgaacacgctagtgagattcgccagcaccagatccacaggcgtcgaaaactccggggctggccccaccagctttaagaccatgaaagtcattgacccccagcacagcgacaaacccaacgtgctgatcctgggttctgggtggggcgctatctcgtttctgaagcacattgacaccaagaagtacaacgtcagcatcatcagccccagaagctatttcttattcacccccctgctgcccagcgcccctgtgggaacagtggacgagaagtccatcattgagcccatcgtgaatttcgccctcaagaaaaaggggaacgtcacctactacgaggccgaagccaccagcatcaatcccgaccggaacaccgttaccatcaagagcttatctgccgtgagccagctataccaacccgagaaccatctggggctgcatcaggccgagcccgccgagattaagtacgactatttaatcagcgccgtgggtgccgagcctaacacctttggaatccccggcgtgaccgactacggtcatttcctgaaagaaatccccaactctctggaaatccggcggacttttgccgccaacctagaaaaggctaacctgttgcctaagggcgaccccgagagaagaagactgctgagcatcgtggtcgtgggcggtggccctacaggtgtggaggctgctggcgaactgcaggactacgttcaccaggacctgagaaagttcctccctgcactggccgaagaagtgcaaattcacctggtcgaagccctgcccatcgtgttgaatatgtttgagaagaagctgagcagctacgcccagagccatttagaaaacacttcgatcaaggtacatctgagaacggccgtggccaaggtggaagagaagcagctgctggccaagacgaaacacgaggacggtaaaataaccgaggaaactatcccctacggcaccttgatttgggccaccggtaacaaggccagaccggtgatcacagacctgttcaagaagatccccgagcagaacagcagcaagagaggcctggccgtgaatgacttcttgcaggtgaaaggcagcaacaacattttcgccatcggcgacaacgcatttgctgggttgcctcctacagcccaggtggcgcaccaggaggccgaatacttggccaagaattttgacaaaatggctcaaatccccaatttccagaagaatctatcctcccggaaggataagattgatctcttgttcgaggaaaacaacttcaagcccttcaagtacaacgatttaggtgccttagcatacctgggaagcgaaagagccattgccaccataagatccggtaagcggaccttctacaccggcggaggcctgatgaccttctacctgtggcggatcttgtacctgtccatgattctgtctgccagaagcagactgaaggtgtttttcgactggatcaaactggcctttttcaaaagggacttttttaagggcctgtag

SEQ ID NO: 890 - DNA, 1542 bp, Artificial Sequence
  source: /note="Description of Artificial Sequence: Synthetic polynucleotide"
atgctgtcgaagaacttgtatagtaacaagcggctgctcacctcgacgaacacgctcgtcagattcgcctccaccagatccaccggcgtggaaaacagcggggctggtcctacctctttcaagaccatgaaggtcatcgacccccagcacagcgacaaacccaacgtgctgatcctgggctcgggctggggagctatctcgtttttaaagcacatcgacaccaagaagtacaacgttagcatcatctctcccagaagctacttcttattcacgcccctgttacccagcgccccagtggggaccgtagacgaaaagtccatcattgagcccatcgtgaatttcgccctgaagaaaaaggggaacgttacctactacgaggccgaggccaccagcatcaatcccgaccggaataccgtgaccataaagtcactgtctgccgtgagccagctataccaacctgagaaccacctaggcctgcatcaggcagagcccgctgaaattaagtacgactacctgatcagcgccgtaggtgccgaacccaacacctttggtatccccggcgtgaccgactacggccacttcctgaaagaaatccccaactctttggaaatccggagaacttttgccgccaatctggagaaggccaacttactgcctaagggcgaccccgaacggagaaggctactgagcattgtggtggtgggtggagggcctacaggtgtagaggctgctggtgaactacaggactacgtgcaccaggacctgagaaagttcctccccgccttggccgaggaagtccagattcacctggtggaagctctgcccatcgtgttgaacatgtttgagaagaagcttagcagctacgcccagtcacatttagaaaacacctccatcaaggtgcatctgagaaccgctgtcgccaaagtggaagagaagcaactgttggccaagaccaagcacgaggacggcaagattaccgaggaaaccatcccctacggtactctgatttgggccacgggtaacaaggcaagacccgtaatcaccgaccttttcaagaagattcctgagcaaaactcgagcaagagaggactggccgtgaacgactttctgcaggtcaaaggcagcaacaacatcttcgccattggcgacaacgcctttgctggcctgccaccaacagcccaagtggcccaccaggaagccgaatacctggccaagaacttcgacaaaatggcccagataccaaatttccagaagaacctgtcttcccggaaggataaaatcgacctgctgttcgaggagaacaacttcaagcccttcaaatacaacgatctgggtgccttagcctacctgggcagcgaaagagccattgccaccatacgtagcggtaagagaaccttctacaccggcggaggcttaatgaccttctacctgtggcggatcttgtacctgagcatgatcctgtctgcccgcagcagactgaaggtgttcttcgactggattaagctggccttcttcaagagggacttctttaagggcctgtga

SEQ ID NO: 891 - DNA, 1542 bp, Artificial Sequence
  source: /note="Description of Artificial Sequence: Synthetic polynucleotide"
atgctaagcaagaacctgtatagtaacaagaggctgctgacctcgaccaacaccctcgtgcgcttcgcctccaccagatccaccggggtcgaaaacagcggggctggccccacatctttcaagaccatgaaggtcatcgaccctcagcacagcgacaaaccaaacgtgctgatactgggttctggctggggcgctatcagctttctgaagcacatcgacaccaagaagtacaacgtcagcatcatcagccctagaagctacttcctgttcacgcctctgctgccctctgcacctgtgggaacagtggacgagaagtcaatcattgagcccatcgttaatttcgctctcaagaaaaagggcaacgttacctactatgaggccgaagccaccagcatcaaccccgaccggaataccgtgaccatcaaaagcctgtctgccgtgagccagctataccagcctgagaaccacctggggctgcatcaagcagaacccgccgagattaagtacgactatctgatcagtgccgtgggcgccgagcctaacacatttggaatccccggcgtcactgattacggccatttcctgaaagaaatccccaactctttggaaatccggagaacttttgccgccaacctggagaaggccaacctgctgccaaagggcgatcccgagcggagaaggctactgagcatcgtggtcgtgggcggtggccccactggtgtggaggccgctggcgagctgcaggattacgttcaccaggacctgcggaagtttctccctgcattggccgaagaagtgcagattcacctggtcgaagccctgcccatcgttctgaacatgttcgagaaaaagctgtcatcatacgcccagtcacacctggaaaacacctccatcaaggtgcatctgagaaccgctgtggccaaagttgaagaaaagcaactgctggccaagacgaagcacgaggacggcaagattaccgaagaaaccatcccatacggtactctgatttgggccacgggcaacaaggcaagacccgtaatcaccgacctgttcaagaagattcccgagcaaaacagcagcaagagaggcttggcagtgaacgactttctgcaggtcaaaggcagcaacaacatcttcgccatcggcgacaatgcctttgctggcctgcctccaaccgcccaggtggcgcaccaggaagccgaatacctggccaagaacttcgataaaatggcccagataccaaatttccagaagaacctgtcctcccggaaggataagattgacctcttgttcgaggaaaacaactttaagcctttcaagtacaacgacctgggcgccctggcctacctgggaagcgaaagagccattgccaccatcagaagcggcaagcggaccttttacaccggcggaggcttaatgaccttctacttatggcggattctgtacttgtccatgatcctatctgcaagaagcagactgaaggtgtttttcgactggatcaaattagcctttttcaagagagacttcttcaagggcctgtag

SEQ ID NO: 892 - DNA, 1542 bp, Artificial Sequence
  source: /note="Description of Artificial Sequence: Synthetic polynucleotide"
atgctgagcaagaatctgtatagtaacaagcggctgctcacctcgaccaacacgctagtgcgcttcgccagcaccagatccaccggcgtggaaaactccggggcaggtcccacaagctttaagaccatgaaggtcatcgaccctcagcacagcgacaagcccaacgtgctgatactgggctcgggctggggagctatttcgtttttaaagcacatcgacaccaagaagtacaacgtttccatcatctctcccagaagctacttcctgttcacccctttgctgcctagcgccccagttggaacagtagacgagaagtccattatcgagcccatcgttaacttcgctctgaagaaaaagggcaacgtcacctactatgaggccgaagccacctctatcaaccccgaccggaacaccgttaccatcaaaagcttaagcgccgtgtcccagctgtaccaacccgagaaccatctggggctgcaccaggccgagcctgctgagattaagtacgactatttaatcagcgccgtaggcgcggaacccaacacctttggtatccccggggtgaccgactacggccacttcctgaaggaaattcccaactctttggaaatccggcggaccttcgccgccaatctagagaaggccaacctgctgcctaagggtgaccccgaacggagaagactgctgagcatcgtcgtcgtgggtggtggccctacaggcgtggaggctgctggtgaactacaggactacgttcaccaggacctgagaaagttcctgcccgccttggccgaggaagtgcagattcacttggtggaagccctgcccatcgtgctgaatatgtttgagaagaagctgagctcatacgcccagagccacctggaaaacacttccatcaaagtacacctgagaacggccgtggccaaagtggaagagaagcagttgctggcaaagaccaagcacgaagacggtaaaataaccgaggaaaccattccctacggtaccctgatttgggccaccggcaacaaggccagacccgtgatcaccgacctgttcaagaaaatccccgagcaaaactcgagcaagagaggattggcagtgaacgacttcttgcaggtgaaaggcagcaacaacatcttcgccatcggcgacaacgcatttgccggcttgccaccaacagcccaagtggcccaccaggaagccgagtacctggccaagaactttgataaaatggctcagatacccaatttccagaagaatctgtcctccagaaaggataaaatcgacctgctgttcgaggaaaacaacttcaagcccttcaagtacaacgatctgggcgccttagcctacctgggcagcgaaagagccattgccaccatcagaagcggtaagcggacattttacaccggtggaggcctgatgaccttctacctgtggcggatcttgtacctgtccatgatcctatctgcccgctcgagactgaaggtgtttttcgactggattaagctggcattcttcaagagggactttttcaaaggactgtga

SEQ ID NO: 893 - DNA, 1542 bp, Artificial Sequence
  source: /note="Description of Artificial Sequence: Synthetic polynucleotide"
atgctaagcaagaacctgtacagtaacaagaggctgctcaccagcaccaataccctcgtccgcttcgcctccaccagatccacaggggtggaaaacagcggagctggtcccaccagcttcaagaccatgaaggtcatcgaccctcagcacagcgacaagcccaacgtgctgatcctgggttctggctggggagccattagctttttaaagcacattgacaccaagaagtacaacgtcagcatcatcagccctagaagctacttcctgttcacccccctgttaccttctgccccagttggaaccgtggacgaaaagtcaatcattgagcccatcgttaacttcgccctgaagaaaaagggcaacgtcacctactacgaggccgaggccacctctatcaaccccgacaggaataccgttaccatcaagtcactgtctgccgtgtcccagctgtaccaacctgaaaaccacctaggcctgcaccaggccgaacctgccgagattaagtacgattacctgatcagtgctgtaggcgcggaacccaacacctttggtattcccggcgtgactgactacggccacttcctgaaagagattcccaactctctggaaatcagaagaactttcgccgccaacctggagaaggccaacttactgccaaagggcgatcccgagcggagaagactgctgtccattgtcgtggtgggcggaggccccactggcgtggaggctgctggcgaactacaggactacgtgcaccaggacctgagaaagtttctgcctgcactggccgaggaagtccaaattcacttggtggaagccctgcccatcgtgctgaacatgttcgagaaaaagcttagcagctacgcgcaatcacatttagaaaacacctccatcaaggtgcacctgagaacggctgtggccaaagttgaagaaaagcagctgctggccaagaccaagcacgaggacggcaagattaccgaggaaactatcccctacggcaccctgatttgggccaccggtaacaaggccagacccgtaatcaccgacctgttcaagaagatccctgagcagaactcgagcaagagaggactggccgtgaacgacttcctgcaagtgaaaggcagcaacaacattttcgccatcggtgacaacgcatttgctggcctgcctccaaccgcccaagtggcgcaccaggaagccgagtatctggccaagaacttcgataaaatggcccagatacccaatttccagaagaacctgtcttccagaaaggataagatcgacctcctgttcgaggaaaacaacttcaaacccttcaagtacaacgatctgggtgccttagcctacctgggctccgaaagggccattgccaccatcagaagcggtaagcggaccttctacaccggtggaggcttaatgaccttctacctgtggagaattctgtacctgagcatgattctgagcgcccgctcgagattaaaggtgtttttcgactggatcaagttagccttcttcaagagggacttttttaagggattatga

SEQ ID NO: 894 - DNA, 1542 bp, Artificial Sequence
  source: /note="Description of Artificial Sequence: Synthetic polynucleotide"
atgctgtcgaagaacctgtacagtaacaagcggctgctcacctcgaccaacaccctcgtcagattcgccagcaccagatccacaggggtggaaaacagcggggctggccctaccagcttcaagaccatgaaggtcattgacccccagcacagcgacaagcccaacgtgctgatcctgggctcgggctggggagccatttcgtttttaaagcacatcgacaccaagaagtacaacgttagcatcatctctcccagaagctatttcttattcacgcctctgctgcccagcgcaccagtgggaaccgtagacgagaagtccattatcgagcccatcgttaacttcgccctcaagaaaaagggcaacgtcacctactatgaggcagaggccaccagcatcaaccccgacaggaacaccgttaccataaagtcattaagcgccgtgagccagctgtaccagcctgagaaccacctaggcctgcaccaagccgagcccgctgagattaagtacgattatttaatcagtgccgtgggtgccgaacccaacacctttggtattcccggcgtgaccgactacggccatttcctgaaagagattcccaactctctggaaatccggagaacttttgccgccaacctggagaaggctaacctgctgcctaagggcgaccccgagagaagaagactactgtccatcgtggtcgtgggtggaggccctactggtgtagaagccgctggtgagctacaggattacgttcaccaggacctgcggaagttcctccccgcattggccgaagaagtgcaaattcacctggtggaagccctgcccatcgtgttgaacatgtttgagaagaagctgtcaagctacgcccagtcacacttagaaaacacttccatcaaggtacatctgagaaccgctgtggccaaggtggaagagaagcaattgttggccaagaccaaacacgaggacggtaaaattaccgaagaaaccatcccatacggcactctgatttgggccaccggtaacaaggcaagaccggtgatcaccgacctgttcaagaagatccccgagcagaacagcagcaagcggggactggcagtgaacgacttcttgcaagtgaaaggcagcaacaacattttcgccatcggcgacaatgcctttgccggcctgcctccaacagcccaggtggcgcaccaggaagccgaatacctggccaagaacttcgacaagatggctcagatccccaatttccagaagaacctgtcttcccggaaggataaaatcgacctcttgttcgaggagaacaacttcaagcccttcaagtacaacgatctgggtgccctggcctacctgggcagcgaaagagccattgccaccatcagatccggcaagagaaccttctacaccggcggaggcctgatgaccttctacttatggagaattctgtacttgagcatgattctgagcgcaagatcgagattaaaggtgttcttcgactggattaagctggccttcttcaaaagagacttcttcaaaggcctgtag

SEQ ID NO: 895 - DNA, 1542 bp, Artificial Sequence
  source: /note="Description of Artificial Sequence: Synthetic polynucleotide"
atgctaagcaagaacttgtacagtaacaagcggttgctcaccagcacgaacaccctcgtcagattcgcctccaccagatccacaggcgtggaaaactccggagctggccccaccagctttaagaccatgaaagtcatcgacccccagcacagcgacaagccaaacgtgctgatcctgggctctggctggggcgctatctcgtttctgaagcacattgacaccaagaagtacaacgtctccatcatctctcccagaagctatttcatcttcacccccctgctgcccagcgcaccagtggggacagtggacgaaaagtccatcatcgagcccatcgtgaacttcgccctgaagaaaaagggcaacgtcacctactatgaggcagaggccacctctatcaaccccgaccggaacaccgtgaccatcaagtcactgagcgccgttagccagctgtaccagcccgaaaaccacctgggcctgcaccaggccgagcccgccgagattaagtacgactatttaatcagtgccgtaggcgcggaacctaacacctttggtatccccggcgtgaccgactacggtcacttcctgaaggaaatccccaacagcctggaaataagaagaaccttcgccgccaacctagagaaggccaacttattgcctaagggcgaccccgagcggagaagactgctgtccattgtggtggttggcggtgggcccactggtgtagaagccgctggtgagctacaggactacgttcaccaggacctgcggaagttcctgcctgccctggccgaggaagtgcagattcacttggtcgaagctctgcccatcgttttgaacatgtttgagaagaagctgagctcatacgcccaaagccatctggaaaacacctcgatcaaagtacacctgagaaccgctgtcgccaaggttgaagaaaagcagctgctggccaagacgaagcacgaggacggtaagattaccgaggaaactatcccctacggtaccttgatttgggccaccggcaacaaggccagacccgtgatcaccgacctgttcaagaagatccctgagcaaaactcgagcaagagaggcttggccgtgaacgacttcctgcaggtcaaaggcagcaacaacatcttcgccattggcgacaacgcctttgccgggttgcctccaacagcccaggtggcccaccaggaggccgagtatctggccaagaactttgacaagatggcccagataccaaatttccaaaagaatctatcttcccggaaggataagatcgatctgttgttcgaggaaaacaactttaaacctttcaagtacaacgatttaggtgccctggcctacctgggcagcgaaagggccattgcaaccataagatccggcaagagaaccttctacaccggcggtggcctgatgaccttctacctgtggcggattctgtacttgagcatgattctgagcgcccgcagcagattaaaggtcttcttcgactggatcaagctggccttcttcaaaagagacttcttcaagggattatag

SEQ ID NO: 896 - DNA, 1542 bp, Artificial Sequence
  source: /note="Description of Artificial Sequence: Synthetic polynucleotide"
atgctatcgaagaatctgtacagcaacaagaggttgctgaccagcacgaataccctcgtgagattcgcttccaccagatccaccggggtggaaaactccggagctggtcccacctctttcaagaccatgaaaatcattgacccccagcacagcgacaaaccaaacgtgctgatactgggctctggctggggcgccatcagctttttaaagcacatcgacaccaagaagtacaacgtcagcatcatcagccccagaagctatttcttattcacccccctgttaccctctgccccagtgggaaccgtggacgagaagtccattattgagcccatcgtgaacttcgctctcaagaaaaaggggaacgtcacctactacgaggccgaagccaccagcatcaatcccgaccggaacaccgttaccataaaaagcctgagcgccgtgtcccagctgtaccaacctgagaaccacctaggcctgcatcaggccgagcccgccgaaattaagtacgactacctgatcagtgccgtgggtgcggaacccaacacctttggtattcccggcgtcactgattacggccacttcctgaaagagatccccaacagcttggaaatcagaagaactttcgccgccaatctggagaaggccaacttactgcctaagggcgatcccgaacggagaaggctactgagcattgtggtggtgggcggaggccctactggcgtagaggccgctggtgaactacaggactacgtgcaccaggacctgcggaagttcctgcctgccttggccgaagaagtgcaaattcacctggtggaagccctgcccatcgtgctgaacatgtttgagaaaaagcttagcagctacgcccagtcacacctggaaaacacctccatcaaggtacacctgagaacggccgtggccaaggttgaagagaagcagttgctggccaagaccaaacacgaggacggcaagattaccgaggaaactatcccctacggtactctgatttgggccaccggtaacaaggcaagaccggtgatcaccgacctgttcaagaagattcccgagcagaacagcagcaagagaggattggcagtgaacgactttttgcaggtcaaaggcagcaacaacattttcgccattggcgacaacgcctttgctgggctgccacctaccgcccaggtggcgcaccaggaagccgagtacttggccaagaactttgacaaaatggcccagatccccaatttccaaaagaacctatcttcacggaaggataaaattgacctcctgttcgaggaaaacaacttcaagcccttcaagtacaacgatttaggcgccctggcctacctgggcagcgaaagggccattgccaccatcagatccggtaagagaaccttctacaccggcggaggcctgatgaccttctacctgtggcggatcttgtacctgtccatgatcctgtctgcccgcagcagactgaaggtgttcttcgactggatcaagttagcatttttcaagagagactttttcaagggactgtag

SEQ ID NO: 897 - DNA, 1542 bp, Artificial Sequence
  source: /note="Description of Artificial Sequence: Synthetic polynucleotide"
atgctgtcgaagaacttgtacagcaacaagcggttgctgaccagcaccaacaccctagtgcgcttcgccagcaccagatccaccggcgtggaaaactccggagctggtcctaccagctttaagaccatgaaagtcatcgacccccagcacagcgacaagcccaacgtgctgatcctgggttctggctggggagccatctcgtttctgaagcacatcgacaccaagaagtacaacgttagcatcgtgtctcctagaagctacttcttattcacccccttgctgccctctgccccagtggggacagtggacgagaagtcaattatcgagcccatcgttaattttgccctgaagaaaaaggggaacgttacctactacgaggcagaggccaccagcatcaatcccgacaggaataccgtgaccatcaagtcactgagcgccgtgagccagctataccagcctgagaaccacctggggctgcatcaagccgaacccgccgagattaagtacgactacttaatcagcgctgtaggtgccgagcccaacacatttggtatccccggcgtgaccgactacggccacttcctgaaggaaatccccaacagcctggaaatccggagaactttcgccgccaacctggagaaggccaacctgctgcctaagggcgatcccgaaagaagaaggctgctgagcatcgtggtggtgggcggtggccccacaggcgtggaggccgctggtgaactgcaggattatgttcaccaggacctgagaaagttcctgcctgcactggccgaggaagtgcagattcacctggtggaagccctgcccatcgtgttgaatatgttcgagaagaagctgagctcatacgcccaaagccacctggaaaacacttccatcaaggtgcatctgagaacggccgtcgccaaagtggaagagaagcaattgttggcaaagacgaaacacgaggacggcaaaattaccgaggaaactattccctacggcactctgatttgggccacgggtaacaaggcaagaccggtgatcacagacctgttcaagaaaatccctgagcagaacagcagcaagcggggactggcagtgaacgactttctgcaggtcaaaggcagcaacaacattttcgccatcggcgacaatgcctttgctggcttgccacctaccgcccaggtggcccaccaggaagccgaatacctggccaagaactttgacaagatggcccaaatacccaatttccaaaagaacctgtcctcccggaaggataaaatcgatctcctgttcgaggagaacaacttcaagcccttcaaatacaacgatttaggtgccctggcctacctgggcagcgaaagagccattgcaaccatcagaagcggcaagagaaccttttacaccggtggaggcctgatgaccttctacctgtggagaatcctgtacttgagcatgatcctgagcgcacgcagcagattaaaggtgtttttcgactggatcaagctggcctttttcaaaagggacttctttaagggattatga

SEQ ID NO: 898 - DNA, 1542 bp, Artificial Sequence
  source: /note="Description of Artificial Sequence: Synthetic polynucleotide"
atgctaagcaagaacctgtatagcaacaagaggttgctgaccagcaccaataccctcgtccgcttcgctagcaccagatccacaggggtggaaaacagcggagctggtcctacaagcttcaagaccatgaaggtcatcgacccccagcacagcgacaaacccaacgtgctgatcctgggttctggctggggagccatctcgtttctgaagcacatcgacaccaagaagtacaacgtttccatcatcagccctagaagctatttcttattcacccccttgctgcccagcgcccctgtgggaacagtggacgaaaagtccatcattgagcccatcgttaacttcgccctgaagaaaaagggcaacgtcacctactacgaggccgaggccacctctatcaatcccgacaggaacaccgtgaccatcaagagcttaagcgccgtttcccagctgtaccagcctgagaaccatctagggctgcatcaggcagagcctgctgagattaagtacgactatctgatcagtgctgtaggcgcggagcctaacacatttggtatccccggcgtgaccgattacggccacttcctgaaagagattcccaactctctggaaataagacggaccttcgccgccaacctggaaaaggccaacctgctgcctaagggcgaccccgagcggagaaggctgctgtccatcgtggtggttggtggagggcctactggcgtggaggctgctggcgagctgcaggactatgtgcaccaggacctgcggaagtttctgcccgccctggccgaagaagtgcagattcacctggtggaagctctgcccatcgtgttgaatatgtttgagaaaaagctgtcatcatacgcccagtcacacttagaaaacacttccatcaaggtacacctgagaaccgctgtcgccaaagttgaagaaaagcagctgttggcaaagaccaaacacgaggacggcaaaattaccgaagaaaccatcccatacggcactctgatttgggccaccggcaacaaggccagacccgtgatcaccgaccttttcaagaagatccccgagcaaaactcgtccaagcggggcctggccgtgaatgacttcctgcaggtcaaaggcagcaacaacatcttcgccatcggcgacaatgcatttgccggcttgcctcctacagcccaggtggcgcaccaagaggccgagtacctggccaagaactttgataagatggctcagatccccaatttccagaagaatctatcctccagaaaggataaaatcgacctgttgttcgaggaaaacaacttcaagcccttcaaatacaacgatctgggcgccttagcatacctgggaagcgaaagagccattgccaccataagatccggcaagagaaccttttacaccggtggtggcctgatgaccttctacttatggcggatcctgtacatgtccatgattctgagcgccagaagcagattaaaggtgttcttcgactggattaagttagcattcttcaaaagggactttttcaaaggcctgtag

SEQ ID NO: 899 - DNA, 1542 bp, Artificial Sequence
  source: /note="Description of Artificial Sequence: Synthetic polynucleotide"
atgctgtcgaagaacctgtatagcaacaagcggttgctgaccagcacgaataccctcgtgagattcgcctccaccagatccaccggggtcgaaaactccggggcaggccctacctcttttaagaccatgaagatcatcgacccccagcacagcgacaagccaaacgtgctgatcctgggctcgggctggggcgctatcagctttctgaagcacatcgacaccaagaagtacaacgtctccatcatcagccccagaagctatttcttatttacgcccttgctgccttctgcccctgtgggaaccgtggacgagaagtccatcatcgagcccatcgttaacttcgccctcaagaaaaagggcaacgttacctactacgaggccgaagccaccagcatcaaccccgaccggaataccgtgaccatcaaaagcctgtctgccgtgagccagctataccagcccgaaaaccacctggggctgcaccaggcagaacctgccgagattaagtacgactacttaatcagcgccgtgggtgccgagcctaacacatttggtatccccggcgtcaccgactacggccacttcctgaaagagatccccaacagcttggaaataagaagaactttcgccgccaacctagagaaggctaacttattgcctaagggcgaccccgaacggagaaggctactgagcattgtggtcgtgggtggtgggcccactggcgtggaggccgctggtgagctgcaggattatgttcaccaggacctgcggaagtttctccctgccttggccgaagaagtgcaaattcacttggtggaagctctgcccatcgttctgaatatgttcgagaagaagctgtcaagctacgcccagtcacatttagaaaacacttcgatcaaagtgcatctgagaaccgccgtggccaaggtggaagagaagcagctgctggccaagaccaagcacgaagacggcaaaattaccgaagaaaccattccatacggcaccctgatttgggccaccggcaacaaggccagacccgtgatcaccgaccttttcaagaaaattcccgagcagaactcgagcaagcggggcctggccgtgaatgacttcctgcaggtcaaaggcagcaacaacatcttcgccatcggcgacaatgcctttgctgggctgccacctaccgcccaagtggcgcaccaggaggccgaatacctggccaagaacttcgacaagatggcccagatacccaatttccagaagaacctatcctcacggaaggataagattgacctcttgttcgaggaaaacaacttcaaacctttcaaatacaacgacctgggtgccctggcctacctgggaagcgaaagagccattgcaaccatccgttccggcaagagaaccttttacaccggcggtggcctgatgaccttctacttatggagaatcttgtacttgagcatgattctgagcgcacgcagcagattaaaggtgttcttcgactggatcaagttagccttcttcaagagggacttcttcaagggcctgtag

SEQ ID NO: 900 - DNA, 1542 bp, Artificial Sequence
  source: /note="Description of Artificial Sequence: Synthetic polynucleotide"
atgctaagcaagaatctgtacagcaacaagaggttgctgaccagcacgaatacgctagtgagattcgcttccaccagatccacaggcgtggaaaacagcggggctggccccacctcttttaagaccatgaaaatcattgacccccagcacagcgacaagcccaacgtgctgatcctgggttcgggctggggagccatcagctttctgaagcacatcgacaccaagaagtacaacgtctccatcatcagccccagaagctacttcctgttcacgcccttgctgccctctgcccctgtggggaccgtagacgagaagtccatcattgagcccatcgtgaactttgctctgaagaaaaagggcaacgtcacctactacgaggccgaagccaccagcatcaaccccgaccggaacaccgtgaccataaagtcattaagcgccgtgtcccagctgtaccaacctgaaaaccacctagggctgcaccaggccgagcccgccgagattaagtacgactacttaatcagtgccgtgggcgcggagcctaacacctttggaatccctggcgtgaccgattacggtcatttcctgaaagagattcccaacagcttggaaatcagaagaaccttcgccgccaatctagaaaaggccaacctgttgcctaagggtgaccccgagcggagaaggctgctgtccattgtcgtggttggtggaggccctactggcgtagaagctgctggcgaactacaggattacgtgcaccaggacctgcggaagtttctgcctgccctggccgaggaagtgcagattcacctggtcgaagctctgcccatcgttttgaatatgtttgagaagaagctgagctcatacgcccagagccacctggaaaacacttcgatcaaagtacatctgagaaccgctgtcgccaaggtggaagagaagcagttgctggcaaagaccaagcacgaggacggtaagattaccgaagaaaccatcccatacggcactctgatttgggccaccggtaacaaggccagacccgtgatcaccgacctgttcaagaagattcccgagcagaactcgtccaagagaggcctggcagtgaacgacttcctgcaggtcaaaggcagcaacaacattttcgccattggtgacaacgcatttgccgggttgccacctacagcccaagtggcccaccaggaggccgaatacctggccaagaacttcgataagatggcccagatacccaatttccaaaagaacctatcttcacggaaggataagatcgacctgctgttcgaggaaaacaactttaagcccttcaagtacaacgatctgggcgccttagcctacctgggcagcgaaagggccattgccaccatcagatccggtaagagaacattttacaccggcggaggcttaatgaccttctacttatggcggatcctgtacttgagcatgatcctaagcgcaagaagcagattaaaggtgttcttcgactggatcaagttagcctttttcaagagggacttctttaagggcttatga

SEQ ID NO: 901 - DNA, 1542 bp, Artificial Sequence
  source: /note="Description of Artificial Sequence: Synthetic polynucleotide"
atgctaagcaagaacctgtacagtaacaagaggctgctcaccagcacgaacacgctcgtgagattcgccagcaccagatccaccggcgtcgaaaactccggagcaggccctacctcttttaagaccatgaaaatcattgacccccagcacagcgacaagcccaacgtgctgatactgggttctgggtggggagctatcagctttctgaagcacatcgacaccaagaagtacaacgtttccatcatctctcccagaagctacttcttattcacccccttgttacccagcgcccctgttggaaccgtggacgagaagtccatcatcgagcccatcgtgaactttgccctgaagaaaaaggggaacgtcacctactacgaggcagaggccaccagcatcaatcccgacaggaataccgtgaccataaagagcctgtctgccgtgagccagctataccagcccgagaaccacctgggcctgcatcaggcagagcctgccgaaattaagtacgactacctgatcagcgctgtaggcgccgaacccaacacctttggaatccccggcgtgactgactacggtcacttcctgaaggagatccccaacagcctggaaatccggagaaccttcgccgccaacctggagaaggccaacttactgcctaagggcgaccccgagagaagaaggctactgtccattgtcgtcgtgggcggagggcccactggcgtagaagctgctggtgagctgcaggattatgttcaccaggacctgagaaagttcctccccgcattggccgaagaagtccagattcacttggtggaagctctgcccatcgtgttgaatatgttcgagaaaaagctgagcagctacgcccagtcacatctggaaaacacttccatcaaggtgcacctgagaaccgccgtcgccaaggttgaagagaagcaattgctggcaaagaccaagcacgaggacggcaaaataaccgaagaaactattccctacggcactctgatttgggccaccggcaacaaggccagaccggtgatcacagacctgttcaagaagattcccgagcagaactcgagcaagcggggattggccgtgaacgacttcctgcaggtcaaaggcagcaacaacatcttcgccatcggcgacaacgcctttgccggcttgccacctaccgcccaagtggcccaccaagaagccgagtacttggccaagaactttgacaagatggctcagatcccaaatttccagaagaacctatcctcacggaaggataagattgacctgctgttcgaggagaacaacttcaaacccttcaagtacaacgacttaggcgccttagcatacctgggctccgaaagagccattgcaaccatcagaagcggtaagagaaccttttacaccggcggtggcctgatgaccttctacttatggagaatcttgtacttgagcatgatcctatctgcccgctcgagattaaaggtgtttttcgactggattaagttagcctttttcaagagggacttttttaagggcctgtga

SEQ ID NO: 902 - DNA, 1542 bp, Artificial Sequence
  source: /note="Description of Artificial Sequence: Synthetic polynucleotide"
atgctaagcaagaacttgtacagcaacaagcggctgctcaccagcaccaacacgctcgtcagattcgctagcaccagatccaccggcgtcgaaaactccggggcaggtcccaccagcttcaagaccatgaaagtcatcgacccccagcacagcgacaagccaaacgtgctgatactgggctcgggctggggcgctatctcgtttctgaagcacatcgacaccaagaagtacaacgtttccatcatcagccccagaagctatttcatcttcacccccttgctgcctagcgcacctgtggggacagtggacgagaagtccatcattgagcccatcgttaacttcgccctcaagaaaaagggcaacgttacctactacgaggcagaggccaccagcatcaatcccgaccggaacaccgtgaccatcaagagcctgtctgccgtttcccagctgtaccaacctgaaaaccatctggggctgcaccaggccgaacctgctgaaattaagtacgattacttaatcagtgccgtaggcgccgagcctaacacctttggaatccccggcgtcaccgactacggccacttcctgaaagaaatccccaacagcctggaaatccggcggaccttcgccgccaacctggagaaggccaacctgctgccaaagggtgatcccgaacggagaagactgctgagcattgtcgtcgtgggcggtggccccacaggtgtggaagctgctggcgaactacaggattacgtgcaccaggacctgagaaagtttctccctgccctggccgaggaagtgcaaattcacttggtggaagccctgcccatcgttctgaacatgtttgagaagaagctgtcaagctacgcgcagtcacacttagaaaacacctccatcaaagtgcacctgagaaccgccgtggccaaggttgaagaaaagcagctgttggccaagaccaagcacgaggacggcaagataaccgaagaaactatcccatacggcactctgatttgggccaccggcaacaaggccagaccggtaatcaccgacctgttcaagaagatccctgagcaaaacagcagcaagcggggcctggccgtgaatgactttttgcaggtgaaaggcagcaacaacatcttcgccatcggcgacaacgcatttgctgggttgccaccaacagcccaggtggcgcaccaggaagccgaatatttggccaagaacttcgacaagatggctcaaatacccaatttccagaagaatctgtcctcacggaaggataaaatcgacctgttgttcgaggagaacaacttcaaacctttcaaatacaacgatctgggcgccttagcatacctgggctccgaaagggccattgccaccatacgtagcggtaagcggacattctacaccggcggaggcttaatgaccttctacctgtggcggatcttgtacctgagcatgatcctgagcgcacgcagcagactgaaggtgtttttcgactggatcaagctggcctttttcaaaagggacttttttaagggcttatag

SEQ ID NO: 903 - DNA, 1542 bp, Artificial Sequence
  source: /note="Description of Artificial Sequence: Synthetic polynucleotide"
atgctgtcgaagaatctgtatagtaacaagcggctgctgaccagcaccaataccctagtccgcttcgcttccaccagatccaccggggtcgaaaactccggggctggtcccacctctttcaagaccatgaaggtcatcgacccccagcacagcgacaaacccaacgtgctgatcctgggctctgggtggggcgccatcagctttctgaagcacattgacaccaagaagtacaacgtctccatcatcagccctagaagctacttcatctttacccccttgttacctagcgcccctgttggaacagtggacgagaagtcaattatcgagcccatcgttaactttgctctgaagaaaaaggggaacgttacctactacgaggcagaagccaccagcatcaatcccgacaggaataccgtgaccatcaagagcttaagcgccgtttcccagctataccagcccgaaaaccacctggggctgcatcaagccgaacctgccgagattaagtacgattacttaatcagtgccgtgggcgccgagcccaacacctttggaattcccggcgtcaccgattacggccatttcctgaaagaaatccccaacagcctggaaatcagacggaccttcgccgccaacctggagaaggccaacttactgcctaagggtgaccccgagcggagaaggctactgtccatcgtggtggtgggtggagggcctactggcgtggaggctgctggtgagctgcaggactacgtgcaccaggacctgcggaagttcctccccgccctggccgaagaagtgcagattcacctggtcgaagccctgcccatcgttctgaatatgttcgagaagaagcttagcagctacgcccagagccacctggaaaacacttccatcaaggtgcacctgagaaccgccgtggccaaagttgaagagaagcaattgctggccaagacgaagcacgaggacggtaagattaccgaggaaaccatcccatacggcaccttgatttgggccaccggtaacaaggcaagacccgtgatcaccgaccttttcaagaagattcccgagcaaaacagctccaagcggggcctggccgtgaacgactttctgcaggtgaaaggcagcaacaacatcttcgccattggcgacaatgcctttgccggcttgccaccaacagcccaagtggcccaccaggaggccgagtatttggccaagaactttgataagatggcccagataccaaatttccagaagaacctatcctcaagaaaggataagatcgatctgctgttcgaggaaaacaacttcaagcccttcaaatacaacgatttaggtgccctggcctacctgggaagcgaaagagccattgcaaccatccgttccggtaagcggaccttctacaccggcggtggcctgatgaccttctacctgtggagaatcttgtacttgagcatgatcctaagcgcaagaagcagactgaaggtgtttttcgactggatcaaactggcatttttcaagagagacttcttcaaaggcttatag

SEQ ID NO: 904 - DNA, 1542 bp, Artificial Sequence
  source: /note="Description of Artificial Sequence: Synthetic polynucleotide"
atgctgagcaagaatttgtatagtaacaagcggctgctgaccagcacgaataccctagtgcgcttcgcttccaccagatccaccggcgtcgaaaacagcggggctggccccaccagcttcaagaccatgaaggtcattgacccccagcacagcgacaaaccaaacgtgctgatcctgggctctggctggggagccattagctttctgaagcacatcgacaccaagaagtacaacgtttccatcatcagccctagaagctacttcctgttcacccctttgctgccctctgccccagtggggacagtggacgagaagtcaatcattgagcccatcgtgaacttcgctctcaagaaaaagggcaacgtcacctactacgaggccgaagccaccagcatcaaccccgaccggaacaccgttaccatcaaaagcttaagcgccgtgagccagctgtaccagcctgagaaccacctgggcctgcatcaagcagagcctgccgaaattaagtacgactacctgatcagtgctgtgggcgccgagcctaacacctttggaattcctggcgtgactgactacggtcatttcctgaaagaaatccccaacagcctggaaatacggcggacctttgccgccaacctagaaaaggccaacctgctgccaaagggtgatcccgagagaagaagactactgtccatcgtggtggtgggcggaggccctactggcgtagaagctgctggcgagctacaggattacgtgcaccaggacctgcggaagttcctgcctgcattggccgaagaaatccagattcacttggtggaagccctgcccatcgttttgaacatgttcgagaaaaagctgagctcatacgcccaaagccatctggaaaacacctccatcaaggtacacctgagaacggctgtggccaaagttgaagaaaagcagctgctggccaagacgaagcacgaagacggcaaaataaccgaagaaaccattccatacggcaccctgatttgggccaccggcaacaaggccagaccggtgatcacagaccttttcaagaaaatccccgagcaaaacagctccaagcggggactggcagtgaacgactttttgcaggtcaaaggcagcaacaacattttcgccattggtgacaacgcctttgccgggctgccacctaccgcccaggtggcccaccaggaagccgagtacctggccaagaatttcgacaagatggcccagatcccaaatttccagaagaacctgtcttccagaaaggataagattgacctcttgttcgaggagaacaacttcaagcccttcaaatacaacgacctgggtgccttagcctacctgggcagcgaaagagccattgcaaccatcagatccggcaagcggaccttctacaccggcggaggcttaatgaccttctacttatggcggatcctgtacttgagcatgatcctgagcgcacgcagcagactgaaggtctttttcgactggattaagctggcctttttcaagagagacttctttaaaggattatga

SEQ ID NO: 905 - DNA, 1542 bp, Artificial Sequence
  source: /note="Description of Artificial Sequence: Synthetic polynucleotide"
atgctgtcgaagaacctgtacagtaacaagaggctgctgaccagcaccaataccctagtccgcttcgcctccaccagatccacaggcgtcgaaaacagcggggcaggccctacctctttcaagaccatgaagatcatcgacccccagcacagcgacaagcccaacgtgctgatactgggctctggctggggagctattagctttttaaagcacatcgacaccaagaagtacaacgtttccatcatctctcccagaagctacttcttatacacgcccttgttacccagcgcacctgtggggaccgtggacgagaagtccattattgagcccatcgtgaactttgccctcaagaaaaagggcaacgtcacctactacgaggcagaggccaccagcatcaatcccgacaggaacaccgtgaccataaaaagcctgagcgccgtttcccagctgtaccagcctgagaaccatctagggctgcaccaagcagagcccgccgaaattaagtacgactatctgatcagtgccgtgggcgcggagcccaacacatttggtatccctggcgtgaccgactacggtcacttcctgaaagaaattcccaactctctggaaatccggagaacctttgccgccaacctagagaaggccaacttactgcctaagggtgaccccgagagaagaaggctactgtccattgtcgtcgttggcggagggcccactggcgtggaggctgctggcgagctgcaggactacgttcaccaggacctgcggaagtttctgcccgccttggccgaggaagtgcagattcacttggtggaagccctgcccatcgttctgaatatgtttgagaagaagcttagctcatacgcgcagtcacatttagaaaacacttccatcaaggtacatctgagaacggccgtggccaaggtggaagaaaagcagttgttggccaagaccaaacacgaagacggcaagattaccgaggaaactatcccctacggcaccttgatttgggccaccggtaacaaggccagaccggtaatcaccgacctgttcaagaaaattcccgagcagaactcgagcaagcggggcctggcagtgaacgactttttgcaagtgaaaggcagcaacaacatcttcgccattggtgacaacgcctttgccgggttgcctcctacagcccaggtggcccaccaggaggccgaatacctggccaagaactttgataaaatggctcagataccaaatttccagaagaacctgtcttcccggaaggataaaatcgacctcctgttcgaggaaaacaacttcaaacctttcaagtacaacgacctgggcgccttagcctacctgggaagcgaaagagccattgccaccatacgtagcggcaagcggaccttctacaccggcggaggcctgatgaccttctacctgtggcggattctgtacctgagcatgatcctgagcgcacgcagcagactgaaggtcttcttcgactggattaagctggccttcttcaagagggacttctttaagggcttatga

SEQ ID NO: 906 - DNA, 1542 bp, Artificial Sequence
  source: /note="Description of Artificial Sequence: Synthetic polynucleotide"
atgctaagcaagaacttgtacagcaacaagcggctgctgaccagcaccaatacgctagtgagattcgcctccaccagatccaccggcgtcgaaaacagcggggctggccccacctctttcaagaccatgaaagtcatcgacccccagcacagcgacaaacccaacgtgctgatcctgggctctgggtggggagctattagctttttaaagcacatcgacaccaagaagtacaacgtctccatcgtgagccccagaagctatttcctgtttacgcccctgctgcctagcgccccagtggggaccgtagacgaaaagtccattattgagcccatcgtgaatttcgccctcaagaaaaagggcaacgtcacctactatgaggcagaagccaccagcatcaaccccgacaggaacaccgtgaccatcaagagcctgagcgccgtgtcccagctgtaccagcccgagaaccatctggggctgcatcaggcagagcccgccgaaattaagtacgactacctgatcagcgctgtgggcgccgaacccaacacatttggtattcctggcgtgaccgattacggtcatttcctgaaagagatccccaacagcctggaaataagacggactttcgccgccaacctagagaaggctaacctgctgccaaagggtgaccccgagagaagaaggctactgtccatcgtcgtcgtgggtggtggccccacaggtgtggaagctgctggcgagctacaggactacgtgcaccaggacctgcggaagtttctgcctgccctggccgaggaaatccaaattcacttggtggaagctctgcccatcgtgttgaacatgttcgagaaaaagctgagcagctacgcgcaaagccacttagaaaacacttcgatcaaggtgcacctgagaaccgccgtggccaaggtggaagaaaagcagttgttggccaagacgaagcacgaagacggtaagataaccgaggaaaccattccctacggtaccctgatttgggccacgggcaacaaggcaagacccgtaatcacagacctgttcaagaaaattcccgagcaaaactcgagcaagagaggcctggccgtgaacgactttttgcaagtcaaaggcagcaacaacattttcgccattggcgacaatgcctttgccggcctgcctcctaccgcccaagtggcccaccaggaggccgaatacctggccaagaatttcgataagatggctcagatccccaatttccaaaagaatctgtcctcaagaaaggataagatcgatctgttgttcgaggaaaacaacttcaagcccttcaagtacaacgatttaggcgccttagcatacctgggaagcgaaagagccattgcaaccatcagatccggcaagagaaccttttacaccggtggaggcctgatgaccttctacctgtggagaatcctgtacctgtccatgatcctaagcgcccgctcgagactgaaggtgttcttcgactggatcaagttagccttcttcaaaagagactttttcaagggcttatga

SEQ ID NO: 907 - DNA, 1542 bp, Artificial Sequence
  source: /note="Description of Artificial Sequence: Synthetic polynucleotide"
atgctaagcaagaatctgtacagtaacaagcggctgctcacctcgaccaacaccctcgtgcgcttcgctagcaccagatccacaggggtcgaaaacagcggggctggccccaccagcttcaagaccatgaaggtcatcgaccctcagcacagcgacaagcccaacgtgctgatcctgggctctgggtggggcgctatcagctttttaaagcacatcgacaccaagaagtacaacgtttccatcgtgagccccagaagctatttcatcttcacccccctgctgcccagcgcaccagtggggaccgtggacgagaagtcaatcattgagcccatcgtgaatttcgctctgaagaaaaaggggaacgttacctactatgaggcagaggccaccagcatcaatcccgaccggaacaccgtgaccatcaaatcattaagcgccgttagccagctataccagcctgagaaccatctaggcctgcaccaggccgagcctgctgaaattaagtacgactatctgatcagtgctgtaggcgccgagcctaacacatttggtattcccggggtcactgattacggccacttcctgaaagaaattcccaacagcctggaaatcagacggacctttgccgccaacctagagaaggctaacttactgcctaagggcgatcccgagagaagaaggctactgagcatcgtggtggttggcggagggcctactggcgtagaagccgctggcgaactacaggattacgttcaccaggacctgcggaagttcctgcccgccctggccgaggaagtccagattcacctggtggaagctctgcccatcgtgctgaacatgttcgagaaaaagctgagctcatacgcgcagtcacatctggaaaacacttcgatcaaagtgcacctgagaaccgctgtggccaaggtggaagagaagcaactgttggccaagaccaagcacgaggacggcaagattaccgaggaaaccattccctacggcaccctgatttgggccaccggtaacaaggccagaccggtgatcacagacctgttcaagaagatccccgagcagaacagcagcaagagaggattggccgtgaacgacttcttgcaggtgaaaggcagcaacaacatcttcgccattggcgacaacgcatttgccggcctgccaccaaccgcccaggtggcccaccaggaggccgagtacctggccaagaactttgataagatggctcaaatacccaatttccaaaagaatctatcctcacggaaggataagatcgatctgttgttcgaggaaaacaacttcaaacctttcaagtacaacgatttaggtgccctggcatacctgggaagcgaaagagccattgccaccatcagaagcggtaagcggaccttttacaccggcggaggcctgatgaccttctacctgtggagaatcctgtacctgtccatgattctgagcgcccgcagcagactgaaggtcttcttcgactggatcaaactggcattcttcaaaagagacttcttcaagggactgtga

SEQ ID NO: 908 - DNA, 1542 bp, Artificial Sequence
  source: /note="Description of Artificial Sequence: Synthetic polynucleotide"
atgctaagcaagaacctgtacagcaacaagaggctgctcaccagcaccaacacgctcgtgcgcttcgctagcaccagatccacaggcgtggaaaacagcggggctggccctaccagctttaagaccatgaaggtcattgacccccagcacagcgacaagccaaacgtgctgatactgggctctggctggggcgctattagctttctgaagcacattgacaccaagaagtacaacgttagcatcatctctcctagaagctacttcatcttcacccctctgctgcctagcgcaccagtggggacagtggacgaaaagtccatcattgagcccatcgtgaatttcgccctgaagaaaaagggcaacgttacctactacgaggccgaggccaccagcatcaaccccgaccggaacaccgtgaccatcaaaagcctgagcgccgtgtcccagctataccagcccgaaaaccacctagggctgcaccaagccgagcctgccgaaattaagtacgactatctgatcagcgccgtaggcgccgagcccaacacatttggaatccccggcgtgaccgactacggccacttcctgaaagagatccccaacagcttggaaatcagacggacctttgccgccaacctagagaaggccaacctgttgccaaagggcgaccccgaacggagaaggctgctgtccattgtcgtggtgggcggaggccctactggtgtggaggccgctggcgaactgcaggattacgtgcaccaggacctgagaaagtttctgcctgcattggccgaggaagtgcagattcacttggtcgaagctctgcccatcgttttgaacatgttcgagaaaaagctgagctcatacgcgcagtcacacctggaaaacacctcgatcaaagtacacctgagaacggccgtcgccaaggtggaagaaaagcagctgctggccaagaccaagcacgaagacggcaagataaccgaagaaaccattccatacggcaccttgatttgggccaccggtaacaaggcaagacccgtaatcacagaccttttcaagaaaattcccgagcagaactcgtccaagcggggactggcagtgaacgactttttgcaggtcaaaggcagcaacaacatcttcgccatcggcgacaacgcatttgccgggctgcctcctacagcccaggtggcccaccaagaagccgaatacttggccaagaatttcgataagatggctcagatcccaaatttccaaaagaatctatcctcacggaaggataaaatcgacctcttgttcgaggaaaacaacttcaagcccttcaaatacaacgacctgggcgccttagcatacctgggctccgaaagagccattgccaccatcagatccggcaagcggaccttttacaccggcggaggcctgatgaccttctacctgtggagaatcatctacctgtccatgatcctaagcgcacgctcgagactgaaggtctttttcgactggatcaaactggccttcttcaagagggactttttcaagggactgtag

SEQ ID NO: 909 - DNA, 1542 bp, Artificial Sequence
  source: /note="Description of Artificial Sequence: Synthetic polynucleotide"
atgctatcgaagaacttgtacagcaacaagcggttgctgacctcgaccaacaccctagtcagattcgcctccaccagatccacaggggtcgaaaacagcggggcaggtcccacctctttcaagaccatgaagatcatcgacccccagcacagcgacaagcccaacgtgctgatcctgggttcgggctggggcgccatttcgtttctgaagcacatcgacaccaagaagtacaacgtcagcatcgtgagccccagaagctacttcttatttacccctttgttaccttctgcaccagtggggaccgtggacgagaagtcaatcattgagcccatcgttaacttcgctctgaagaaaaaggggaacgtcacctactacgaggcagaggccaccagcatcaaccccgacaggaacaccgttaccatcaagtcactgtctgccgtgagccagctgtaccagcccgagaaccatctagggctgcaccaagcagagcccgccgagattaagtacgactacctgatcagtgccgtgggtgccgagcccaacacatttggaattcccggggtgactgactacggccacttcctgaaagagatccccaactctctggaaatccggagaaccttcgccgccaacctggaaaaggccaacctgttgccaaagggcgatcccgaaagaagaagactgctgagcattgtcgtggtgggcggagggcctacaggtgtggaagccgctggcgagctgcaggactacgtgcaccaggacctgcggaagttcctgcccgccctggccgaggaagtgcagattcacttggtggaagccctgcccatcgtgctgaacatgttcgagaaaaagctttcatcatacgcccagagccatttagaaaacacttccatcaaagtacacctgagaaccgccgtggccaaggtggaagagaagcagctgctggccaagaccaaacacgaggacggtaagattaccgaagaaaccatcccatacggcactttgatttgggccaccggtaacaaggccagaccggtgatcacagacctgttcaagaagatccccgagcagaacagctccaagagaggcttggcagtgaacgactttctgcaggtcaaaggcagcaacaacatcttcgccattggcgacaacgcctttgccgggctgccacctacagcccaagtggcgcaccaggaggccgagtacttggccaagaatttcgacaagatggcccaaataccaaatttccagaagaacctatcttcaagaaaggataaaattgacctcctgttcgaggagaacaactttaaacctttcaagtacaacgacctgggcgccctggcctacctgggcagcgaaagggccattgcaaccatcagaagcggtaagagaacattctacaccggtggtggcttaatgaccttctacttatggagaatcctgtacctgagcatgattctaagcgcaagatcgagactgaaggtcttcttcgactggatcaaactggcattcttcaaaagggacttcttcaagggcctgtga

SEQ ID NO: 910 - DNA, 1542 bp, Artificial Sequence
  source: /note="Description of Artificial Sequence: Synthetic polynucleotide"
atgctgtcgaagaacctgtatagcaacaagcggctgctgaccagcaccaacacgctcgtccgcttcgcctccaccagatccaccggggtggaaaacagcggagctggccccacctcttttaagaccatgaaaatcattgacccccagcacagcgacaaacccaacgtgctgatcctgggctctggctggggagccattagctttttaaagcacattgacaccaagaagtacaacgtctccatcgtgagccccagaagctacttcttattcacccccttgctgccctctgcccctgttggaacagtggacgaaaagtccatcatcgagcccatcgttaacttcgccctgaagaaaaaggggaacgttacctactatgaggccgaggccaccagcatcaatcccgacaggaacaccgtgaccatcaagagcctgtctgccgttagccagctataccaacccgagaaccacctagggctgcaccaagccgaacccgctgagattaagtacgactacctgatcagtgccgtaggtgccgagcccaacacctttggaattcctggggtgactgactacggtcatttcctgaaggagattcccaactctctggaaatcagacggactttcgccgccaacctggaaaaggctaacctgttgcctaagggtgatcccgagagaagaagactgctgagcatcgtcgtcgttggcggtgggcccacaggtgtggaggccgctggcgagctgcaggactacgttcaccaggacctgagaaagtttctccccgccctggccgaggaagtgcagattcacttggtcgaagccctgcccatcgtgttgaacatgttcgagaagaagctttcatcatacgcccaaagccacctggaaaacacctcgatcaaagtacacctgagaaccgccgtggccaaagttgaagagaagcagctgctggccaagaccaaacacgaagacggcaagattaccgaagaaaccatcccctacggcactctgatttgggccaccggcaacaaggcaagacccgtgatcaccgacctgttcaagaagatccccgagcagaactcgagcaagagaggcctggcagtgaacgacttcctgcaggtgaaaggcagcaacaacattttcgccatcggtgacaatgcatttgctgggttgcctcctacagcccaggtggcccaccaggaggccgaatacttggccaagaacttcgataagatggctcaaatcccaaatttccaaaagaacctgtcctcacggaaggataagatcgatctcctgttcgaggaaaacaacttcaaacccttcaagtacaacgacctgggcgccttagcctacctgggaagcgaaagagccattgccaccatacgtagcggtaagcggaccttctacaccggtggaggcttaatgaccttctacctgtggcggattttgtacctgagcatgatcctaagcgcacgctcgagactgaaggtcttcttcgactggatcaaattagcctttttcaaaagggactttttcaagggactgtga

SEQ ID NO: 911 - DNA, 1542 bp, Artificial Sequence
  source: /note="Description of Artificial Sequence: Synthetic polynucleotide"
atgctaagcaagaatctgtacagcaacaagcggctgctgacctcgaccaataccctagtgagattcgctagcaccagatccaccggggtggaaaacagcggagctggtcccaccagcttcaagaccatgaagatcatcgacccccagcacagcgacaagccaaacgtgctgatcctgggctcggggtggggcgccattagctttctgaagcacatcgacaccaagaagtacaacgttagcatcgtgtctcctagaagctatttcctgttcacgcccctgctgccctctgccccagttggaaccgtagacgagaagtccattatcgagcccatcgtgaattttgccctcaagaaaaaggggaacgtcacctactatgaggcagaagccaccagcatcaatcccgacaggaacaccgttaccataaagtcactgagcgccgtttcccagctataccaacccgagaaccatctaggcctgcaccaagcagagcccgccgaaattaagtacgactatctgatcagcgccgtaggcgccgagcccaacacctttggaattcctggggtcaccgactacggccacttcctgaaagagatccccaacagcctggaaatccggagaactttcgccgccaatctggaaaaggccaacttactgcctaagggtgatcccgaacggagaagactactgagcatcgtcgtggttggcggtgggcctactggcgtggaagctgctggcgagctacaggattacgtgcaccaggacctgcggaagtttctccctgcactggccgaagaagtgcagattcacctggtggaagccctgcccatcgtgctgaacatgttcgagaagaagcttagcagctacgcccagtcacacttagaaaacacttcgatcaaggtgcatctgagaaccgctgtggccaaggttgaagagaagcagctgctggccaagacgaagcacgaggacggcaaaattaccgaggaaaccatcccatacggcaccctgatttgggccaccggcaacaaggccagacccgtgatcaccgacctgttcaagaagatccccgagcagaacagctccaagagaggcttggcagtgaatgacttcctgcaggtcaaaggcagcaacaacatcttcgccatcggcgacaacgcctttgctggcttgccaccaacagcccaggtggcgcaccaagaagccgagtacctggccaagaattttgataagatggctcaaatacccaatttccagaagaatctgtcctcaagaaaggataagatcgacctcttgttcgaggagaacaacttcaaacccttcaagtacaacgatctgggcgccttagcctacctgggaagcgaaagggccattgccaccataagaagcggtaagcggacattctacaccggtggaggcttaatgaccttctacctgtggagaatcctgtacttgagcatgatcctatctgcaagatcgagactgaaggtcttcttcgactggattaaactggccttcttcaagagggactttttcaagggcttatga

SEQ ID NO: 912 - DNA, 1542 bp, Artificial Sequence
  source: /note="Description of Artificial Sequence: Synthetic polynucleotide"
atgctgagcaagaacctgtacagtaacaagaggctgctgacctcgacgaacacgctagtgagattcgccagcaccagatccacaggggtcgaaaactccggggcaggccccacaagctttaagaccatgaaagtcattgacccccagcacagcgacaaaccaaacgtgctgatcctgggttctgggtggggcgctatttcgtttctgaagcacatcgacaccaagaagtacaacgtcagcatcgtgagccccagaagctacttcctgttcacccctttgttacccagcgcccctgtgggaaccgtggacgagaagtccatcatcgagcccatcgtgaactttgccctcaagaaaaagggcaacgtcacctactatgaggccgaggccaccagcatcaaccccgaccggaacaccgttaccatcaaatcactgagcgccgtttcccagctgtaccaacctgagaaccatctgggcctgcaccaagccgagcccgccgagattaagtacgattatttaatcagtgccgtgggcgccgaacccaacacatttggaattcctggcgtgaccgactacggtcacttcctgaaagagatccccaacagcttggaaataagacggaccttcgccgccaacctggaaaaggccaacttactgccaaagggcgatcccgagcggagaaggctgctgagcattgtcgtcgttggcggtggccctactggtgtagaagccgctggcgaactgcaggattatgtgcaccaggacctgcggaagttcctccctgcactggccgaggaagtccagattcacctggtggaagccctgcccatcgtgctgaatatgttcgagaagaagctgagctcatacgcccaatcacatctggaaaacacttcgatcaaagtgcacctgagaacggctgtcgccaaagtggaagagaagcaactgctggcaaagaccaagcacgaagacggcaaaattaccgaagaaactatcccatacggtactttgatttgggccaccggtaacaaggccagacccgtgatcaccgacctgttcaagaagatccctgagcagaacagctccaagagaggcctggccgtgaatgactttttgcaggtgaaaggcagcaacaacatcttcgccatcggtgacaatgcatttgctggcttgcctcctacagcccaggtggcccaccaggaggccgaatatctggccaagaacttcgacaagatggcccaaatccccaatttccaaaagaacctatcttcaagaaaggataaaatcgacctgctgttcgaggaaaacaacttcaagcccttcaaatacaacgacctgggtgccctggcctacctgggatccgaaagagccattgcaaccatcagaagcggcaagcggacattctacaccggtggaggcttaatgaccttctacttatggcggattatctacctgagcatgatcctaagcgcaagaagcagattaaaggtgttcttcgactggatcaaactggccttcttcaaaagagacttctttaagggcctgtga

SEQ ID NO: 913 - DNA, 1542 bp, Artificial Sequence
  source: /note="Description of Artificial Sequence: Synthetic polynucleotide"
atgctgtcgaagaacttgtatagtaacaagcggctgctcaccagcacgaataccctcgtccgcttcgcttccaccagatccaccggcgtcgaaaacagcggggctggccccacctcttttaagaccatgaagatcatcgacccccagcacagcgacaagccaaacgtgctgatactgggctctgggtggggcgccatcagctttttaaagcacattgacaccaagaagtacaacgtttccatcatcagccccagaagctatttcatctttacgcccctgttacccagcgcccctgtgggaaccgtagacgagaagtccatcatcgagcccatcgttaacttcgctctgaagaaaaaggggaacgtcacctactacgaggccgaggccaccagcatcaaccccgaccggaataccgttaccatcaaatcactgagcgccgtgagccagctgtaccaacccgaaaaccatctagggctgcaccaggccgaacccgccgagattaagtacgattacttaatcagcgctgtgggtgcggaacctaacacctttggaattcctggggtcaccgattacggccatttcctgaaagaaatccccaacagcttggaaatccggagaactttcgccgccaacctggaaaaggccaacttactgccaaagggtgatcccgagagaagaaggctgctgagcatcgtggtcgtgggcggaggccctactggcgtagaggctgctggcgaactgcaggactatgttcaccaggacctgagaaagttcctccccgccctggccgaagaagtgcagattcacttggtggaagccctgcccatcgtgctgaacatgtttgagaaaaagctgtcatcatacgcgcaaagccatttagaaaacacctccatcaaggtacacctgagaacggccgtggccaaagtggaagaaaagcagttgttggcaaagaccaaacacgaagacggcaagataaccgaagaaaccatcccctacggcaccttgatttgggccaccggcaacaaggccagaccggtgatcaccgacctgttcaagaagattcccgagcagaacagctccaagcggggcctggccgtgaacgacttcctgcaagtcaaaggcagcaacaacattttcgccattggcgacaacgcctttgccggcttgcctcctacagcccaggtggcccaccaggaagccgaatacctggccaagaactttgacaaaatggctcagatccccaatttccagaagaacctgtcctccagaaaggataaaattgatctcctgttcgaggagaacaactttaaacccttcaaatacaacgacttaggcgccctggcctacctgggctccgaaagagccattgccaccatcagatccggcaagcggacattctacaccggtggtggcctgatgaccttctacttatggcggatcctgtacctgtccatgattctatctgcccgcagcagattaaaggtcttcttcgactggatcaagttagcatttttcaagagagacttttttaagggcctgtga

SEQ ID NO: 914 - DNA, 1542 bp, Artificial Sequence
  source: /note="Description of Artificial Sequence: Synthetic polynucleotide"
atgctgagcaagaacctgtacagcaacaagaggctgctgaccagcacgaacaccctcgtccgcttcgcctccaccagatccaccggcgtggaaaacagcggagctggccccacatcttttaagaccatgaaggtcatcgacccccagcacagcgacaagccaaacgtgctgatactgggttctgggtggggagccatcagctttctgaagcacattgacaccaagaagtacaacgtctccatcatcagccccagaagctatttcctgttcacgcccctgctgccctctgcaccagtgggaaccgtggacgagaagtcaatcatcgagcccatcgttaactttgccctcaagaaaaagggcaacgtcacctactacgaggccgaagccaccagcatcaaccccgacaggaacaccgttaccataaaaagcttatctgccgtttcccagctataccagcctgagaaccatctgggcctgcatcaggcagaacctgctgagattaagtacgactacttaatcagcgccgtgggcgcggaacctaacacctttggtatccccggggtcaccgactacggtcacttcctgaaagaaatccccaacagcctggaaatcagaagaacttttgccgccaacctggagaaggccaacctgctgccaaagggcgaccccgaacggagaaggctactgagcattgtcgtggttggcggtgggcccacaggcgtagaggctgctggcgaactacaggactatgtgcaccaggacctgcggaagttcctgcccgccctggccgaggaaatccagattcacctggtcgaagctctgcccatcgttttgaatatgtttgagaagaagcttagctcatacgcccaatcacacttagaaaacacctccatcaaggtacacctgagaaccgctgtggccaaggtggaagaaaagcagttgctggccaagaccaagcacgaagacggcaagattaccgaggaaaccattccctacggcaccctgatttgggccacgggcaacaaggccagaccggtgatcaccgacctgttcaagaagatccctgagcaaaactcgtccaagcggggcctggcagtgaacgacttcctgcaggtgaaaggcagcaacaacatcttcgccatcggcgacaacgcctttgctgggttgcctccaaccgcccaggtggcccaccaggaggccgaatacttggccaagaattttgacaagatggcccaaatacccaatttccaaaagaatctatcctcacggaaggataagattgacctcctgttcgaggaaaacaacttcaagcctttcaagtacaacgatctgggcgccttagcctacctgggatccgaaagagccattgcaaccatccgtagcggcaagagaaccttctacaccggcggaggcttaatgaccttctacttatggcggatcatctacttgagcatgattctgtctgcccgctcgagactgaaggtctttttcgactggatcaagctggccttcttcaagagggacttcttcaagggcttatag

SEQ ID NO: 915 - DNA, 1542 bp, Artificial Sequence
  source: /note="Description of Artificial Sequence: Synthetic polynucleotide"
atgctatcgaagaacttgtatagcaacaagaggctgctcaccagcacgaacaccctcgtgcgcttcgccagcaccagatccacaggcgtcgaaaactccggggcaggtcctaccagcttcaagaccatgaaggtcattgacccccagcacagcgacaaacccaacgtgctgatactgggctctggctggggagccatctcgtttttaaagcacatcgacaccaagaagtacaacgtttccatcatcagccctagaagctacttcatcttcacgcccctgttacctagcgcccctgttggaacagtggacgagaagtccatcatcgagcccatcgtgaatttcgctctcaagaaaaagggcaacgttacctactatgaggcagaagccaccagcatcaatcccgaccggaataccgttaccatcaagtcattaagcgccgtgagccagctgtaccagcccgaaaaccatctagggctgcatcaggccgaacccgccgagattaagtacgactatctgatcagcgctgtaggtgccgaacccaacacatttggtatccctggcgtcaccgattacggccatttcctgaaggagattcccaacagcctggaaatccggcggacttttgccgccaacctggaaaaggctaacctgctgcctaagggcgaccccgagagaagaaggctactgagcatcgtcgtcgtgggcggaggccctactggcgtagaagctgctggcgagctacaggattacgttcaccaggacctgcggaagttcctgcccgccctggccgaggaagtccagattcacttggtggaagccctgcccatcgtgctgaatatgtttgagaaaaagctgtcaagctacgcccagagccatctggaaaacacctccatcaaagtgcacctgagaaccgccgtcgccaaagttgaagagaagcaactgctggcaaagaccaaacacgaggacggcaagattaccgaggaaaccatcccctacggcaccctgatttgggccaccggcaacaaggccagacccgtaatcaccgacctgttcaagaaaatccccgagcaaaacagcagcaagcggggcttggccgtgaacgacttcttgcaggtcaaaggcagcaacaacatcttcgccatcggtgacaacgcatttgccggcttgccaccaacagcccaggtggcccaccaagaagccgaatatttggccaagaacttcgacaagatggcccagatccccaatttccaaaagaatctatcctcaagaaaggataagatcgatctgttgttcgaggagaacaacttcaaacccttcaaatacaacgacctgggcgccttagcatacctgggcagcgaaagagccattgcaaccatacgtagcggtaagcggaccttttacaccggtggaggcctgatgaccttctacttatggagaatcatctacatgtccatgattctgtctgcacgcagcagattaaaggtgttcttcgactggattaagctggcattcttcaagagggacttcttcaaaggattatga

SEQ ID NO: 916 - DNA, 1542 bp, Artificial Sequence
  source: /note="Description of Artificial Sequence: Synthetic polynucleotide"
atgctgagcaagaatttgtacagtaacaagcggctgctcaccagcaccaacaccctagtgagattcgctagcaccagatccaccggcgtcgaaaacagcggggcaggtcccacaagcttcaagaccatgaaggtcattgaccctcagcacagcgacaaaccaaacgtgctgatactgggctctggctggggcgctattagctttctgaagcacatcgacaccaagaagtacaacgtcagcatcgtgagccccagaagctacttcttatacacgcccctgctgcccagcgcccctgttgggaccgtagacgagaagtcaatcattgagcccatcgtgaacttcgctctgaagaaaaagggcaacgtcacctactatgaggccgaggccaccagcatcaaccccgaccggaataccgtgaccataaaatcactgagcgccgtgagccagctgtaccagcctgaaaaccacctagggctgcaccaggccgaacctgctgaaattaagtacgactacctgatcagcgccgtaggcgcggaacctaacacctttggaatccccggggtgactgactacggccatttcctgaaagaaatccccaacagcctggaaatacggagaacctttgccgccaatctggaaaaggccaacctgttgcctaagggtgaccccgaaagaagaaggctactgagcatcgtcgtggtgggcggtggccccactggcgtggaggccgctggcgagctgcaggactacgttcaccaggacctgagaaagtttctccccgcattggccgaagaaatccagattcacctggtggaagccctgcccatcgtgctgaacatgtttgagaaaaagcttagctcatacgcgcaatcacacttagaaaacacctccatcaaagtacacctgagaacggccgtcgccaaggttgaagagaagcaattgttggccaagaccaagcacgaggacggcaagattaccgaggaaaccatcccctacggcaccctgatttgggccaccggcaacaaggcaagaccggtgatcaccgacctgttcaagaagatccctgagcaaaacagcagcaagcggggcttggcagtgaatgacttcctgcaggtgaaaggcagcaacaacatcttcgccattggcgacaacgcatttgctggcctgccacctaccgcccaggtggcgcaccaggaagccgagtatctggccaagaacttcgacaaaatggctcagatacccaatttccagaagaacctgtcctcacggaaggataagattgacctgttgttcgaggaaaacaactttaaacctttcaaatacaacgatctgggcgccttagcatacctgggatccgaaagagccattgccaccataagaagcggcaagcggacattttacaccggcggaggcctgatgaccttctacttatggcggatcttgtacctgtccatgattctaagcgccagatcgagactgaaggtgttcttcgactggattaagttagcctttttcaaaagggacttcttcaagggcctgtag

SEQ ID NO: 917 - DNA, 1542 bp, Artificial Sequence
  source: /note="Description of Artificial Sequence: Synthetic polynucleotide"
atgctgagcaagaatctgtacagcaacaagcggttgctcaccagcaccaacacgctcgtgcgcttcgcctccaccagatccaccggcgtcgaaaacagcggggcaggccccacatcttttaagaccatgaaggtcattgacccccagcacagcgacaagcccaacgtgctgatactgggctctgggtggggagctatctcgtttttaaagcacatcgacaccaagaagtacaacgtcagcatcgtgagccccagaagctatttcctgtacacgcctctgttacccagcgcacctgtggggaccgtggacgagaagtccattattgagcccatcgtgaatttcgccctgaagaaaaagggcaacgtcacctactacgaggccgaggccaccagcatcaatcccgacaggaacaccgttaccataaagtcactgtctgccgtgagccagctataccagcccgagaaccatctagggctgcatcaagccgaacccgctgagattaagtacgattacctgatcagcgctgtgggcgcggaacccaacacatttggaatccccggcgtcaccgactacggtcacttcctgaaggagatccccaacagcttggaaatcagacggacctttgccgccaatctggagaaggctaacctgctgccaaagggcgaccccgagcggagaaggctgctgagcatcgtcgtggtgggtggtggccctactggcgtggaggctgctggcgaactgcaggactacgttcaccaggacctgcggaagtttctccccgccctggccgaagaagtgcagattcacctggtggaagccctgcccatcgtgctgaacatgtttgagaaaaagcttagcagctacgcgcaaagccatctggaaaacacctccatcaaagtacacctgagaaccgctgtcgccaaggtggaagaaaagcaactgttggcaaagaccaagcacgaggacggcaaaattaccgaggaaaccatcccatacggcactttgatttgggccaccggcaacaaggccagaccggtaatcacagacctgttcaagaagatccccgagcaaaacagcagcaagcggggattggccgtgaatgacttcctgcaagtcaaaggcagcaacaacatcttcgccattggtgacaatgcctttgccggcctgcctcctacagcccaggtggcgcaccaggaggccgaatacctggccaagaatttcgataaaatggcccaaatccccaatttccaaaagaacctgtcctccagaaaggataaaatcgacctcctgttcgaggagaacaactttaaacccttcaaatacaacgatttaggcgccctggcatacctgggctccgaaagagccattgccaccatccgttccggcaagagaacattttacaccggcggtggcctgatgaccttctacttatggcggatcttgtacatgagcatgattctgtctgcacgcagcagactgaaggtgtttttcgactggatcaagctggcatttttcaagagagacttcttcaagggcctgtga

SEQ ID NO: 918 - DNA, 1542 bp, Artificial Sequence
  source: /note="Description of Artificial Sequence: Synthetic polynucleotide"
atgctgtcgaagaatctgtacagcaacaagcggctgctcaccagcaccaataccctcgtgagattcgcttccaccagatccaccggcgtcgaaaactccggagctggtcccacatctttcaagaccatgaaaatcatcgacccccagcacagcgacaagcccaacgtgctgatactgggctcgggctggggcgccatctcgtttttaaagcacatcgacaccaagaagtacaacgtctccatcatctctcccagaagctacttcatctttacccccctgctgcctagcgcccctgttggaacagtggacgagaagtcaatcattgagcccatcgtgaacttcgctctgaagaaaaaggggaacgttacctactacgaggccgaagccaccagcatcaatcccgaccggaataccgttaccatcaagagcctgagcgccgttagccagctgtaccaacctgaaaaccacctggggctgcatcaagccgaacccgccgaaattaagtacgattacctgatcagtgccgtaggtgccgagcccaacacctttggaattcctggcgtgaccgactacggccacttcctgaaagaaattcccaacagcctggaaataagacggactttcgccgccaacctagaaaaggctaacctgttgcctaagggcgaccccgagagaagaaggctgctgagcatcgtggtcgtgggcggtggccccacaggcgtggaagctgctggtgaactgcaggactacgttcaccaggacctgagaaagttcctccccgccctggccgaggaaatccaaattcacctggtggaagctctgcccatcgttctgaacatgtttgagaagaagctgagcagctacgcgcagagccacttagaaaacacctccatcaaggtgcatctgagaacggctgtggccaaggttgaagagaagcagctgctggccaagacgaaacacgaggacggcaaaattaccgaggaaactatcccctacggtaccctgatttgggccaccggtaacaaggcaagaccggtgatcaccgaccttttcaagaaaattcctgagcaaaactcgagcaagcggggcctggcagtgaacgacttcttgcaggtgaaaggcagcaacaacatcttcgccatcggtgacaacgcctttgctgggctgccacctaccgcccaggtggcccaccaagaggccgagtatttggccaagaattttgacaaaatggcccagataccaaatttccagaagaatctatcctccagaaaggataagattgacctgctgttcgaggaaaacaacttcaaacctttcaagtacaacgatctgggtgccctggcatacctgggctccgaaagggccattgccaccatccgttccggcaagcggaccttctacaccggcggtggcctgatgaccttctacctgtggcggattctgtacctgagcatgatcctgagcgcccgcagcagattaaaggtcttcttcgactggattaagctggcattcttcaaaagagactttttcaagggactgtag

SEQ ID NO: 919 - DNA, 1542 bp, Artificial Sequence
  source: /note="Description of Artificial Sequence: Synthetic polynucleotide"
atgctgagcaagaacctgtatagcaacaagaggttgctcaccagcaccaacaccctcgtcagattcgccagcaccagatccaccggcgtcgaaaacagcggagctggccccacaagctttaagaccatgaaagtcatcgacccccagcacagcgacaagccaaacgtgctgatactgggttcggggtggggcgctatctcgtttctgaagcacatcgacaccaagaagtacaacgtttccatcgtgagccctagaagctatttcttatacacccccctgctgcctagcgcccctgtggggacagtggacgagaagtccatcattgagcccatcgttaacttcgccctgaagaaaaagggcaacgtcacctactatgaggccgaggccaccagcatcaaccccgaccggaacaccgttaccatcaagagcttatctgccgtgagccagctataccaacccgagaaccacctgggcctgcatcaagccgagcctgccgagattaagtacgactatttaatcagcgccgtgggtgcggagcctaacacctttggaatccctggggtgactgactacggccacttcctgaaggaaatccccaactctttggaaatacggagaaccttcgccgccaacctggaaaaggccaacctgttgccaaagggtgaccccgagcggagaaggctgctgtccatcgtggtcgtgggcggagggcccactggcgtagaggccgctggtgagctgcaggactacgtgcaccaggacctgcggaagtttctccctgccctggccgaggaagtccaaattcacctggtggaagccctgcccatcgttctgaatatgttcgagaagaagctgtcaagctacgcgcaaagccacttagaaaacacctccatcaaggtgcacctgagaaccgccgtcgccaaggtggaagagaagcaactgttggccaagacgaagcacgaagacggcaaaattaccgaagaaactattccctacggcaccttgatttgggccacgggtaacaaggccagacccgtaatcacagaccttttcaagaaaattcccgagcagaactcgagcaagcggggactggccgtgaatgacttcttgcaagtcaaaggcagcaacaacattttcgccatcggcgacaatgcctttgccggcctgccaccaaccgcccaggtggcccaccaagaggccgagtacttggccaagaatttcgacaaaatggcccaaatccccaatttccagaagaatctgtcttccagaaaggataagattgacctgctgttcgaggaaaacaactttaagcctttcaagtacaacgacttaggcgccttagcctacctgggctccgaaagagccattgccaccatccgtagcggcaagagaacattttacaccggtggaggcttaatgaccttctacctgtggagaatcctgtacatgagcatgatcctgagcgcccgctcgagattaaaggtgtttttcgactggatcaaattagcctttttcaagagggacttcttcaaaggattatga

SEQ ID NO: 920 - DNA, 1542 bp, Artificial Sequence
  source: /note="Description of Artificial Sequence: Synthetic polynucleotide"
atgctgagcaagaacctgtatagcaacaagcggctgctgaccagcaccaacacgctagtgcgcttcgctagcaccagatccacaggggtggaaaacagcggggctggtcccacatctttcaagaccatgaagatcatcgacccccagcacagcgacaagcccaacgtgctgatactgggctctgggtggggcgctatctcgtttctgaagcacattgacaccaagaagtacaacgttagcatcatcagccctagaagctacttcttattcacccccctgttaccctctgcccctgtgggaacagtggacgaaaagtcaattatcgagcccatcgttaattttgctctcaagaaaaaggggaacgtcacctactatgaggccgaggccacctctatcaaccccgaccggaacaccgttaccatcaagtcattatctgccgttagccagctgtaccagcccgaaaaccatctggggctgcatcaggccgagcccgctgagattaagtacgattatttaatcagtgccgtaggtgcggaacccaacacatttggaatccccggcgtgactgactacggccacttcctgaaggagattcccaacagcttggaaatcagacggaccttcgccgccaatctggagaaggccaacctgctgcctaagggtgaccccgaaagaagaagactgctgagcatcgtggtggtgggtggaggccctactggcgtggaagctgctggcgagctgcaggactacgtgcaccaggacctgagaaagttcctccccgcattggccgaagaagtgcagattcacctggtcgaagctctgcccatcgtgttgaatatgttcgagaagaagctgtcatcatacgcccagagccacctggaaaacacctcgatcaaggtacacctgagaaccgccgtggccaaagtggaagaaaagcaattgttggcaaagaccaaacacgaggacggcaaaattaccgaggaaaccatcccctacggcactctgatttgggccacgggcaacaaggccagaccggtaatcaccgacctgttcaagaaaatccccgagcaaaacagctccaagcggggcctggcagtgaatgactttctgcaggtcaaaggcagcaacaacatcttcgccattggcgacaacgcatttgctggcctgcctcctacagcccaggtggcccaccaggaggccgaatatttggccaagaactttgacaaaatggcccaaatcccaaatttccagaagaatctatcctcacggaaggataagattgacctgctgttcgaggagaacaactttaagcctttcaaatacaacgacctgggcgccctggcctacctgggcagcgaaagagccattgccaccatccgtagcggcaagcggaccttttacaccggcggtggcctgatgaccttctacttatggcggatcatctacatgagcatgatcctgtctgccagatcgagattaaaggtgttcttcgactggatcaagctggcattcttcaagagggactttttcaaaggactgtga

SEQ ID NO: 921 - DNA, 1542 bp, Artificial Sequence
  source: /note="Description of Artificial Sequence: Synthetic polynucleotide"
atgctgagcaagaacctgtatagcaacaagcggttgctgaccagcaccaacacgctagtcagattcgcttccaccagatccaccggggtcgaaaacagcggggctggccctaccagcttcaagaccatgaagatcatcgacccccagcacagcgacaagcccaacgtgctgatactgggttctggctggggagctatcagctttttaaagcacattgacaccaagaagtacaacgttagcatcatcagccctagaagctacttcctgttcacccccttgctgcctagcgccccagtgggaacagtagacgagaagtccatcatcgagcccatcgtgaactttgccctcaagaaaaaggggaacgttacctactacgaggccgaagccacctctatcaatcccgacaggaacaccgtgaccataaaatcactgagcgccgtttcccagctgtaccaacctgagaaccacctgggcctgcatcaggccgagcccgctgagattaagtacgactacctgatcagcgctgtaggcgcggagcctaacacctttggaattcctggcgtgaccgattacggccacttcctgaaagagattcccaactctctggaaatcagaagaaccttcgccgccaatctggagaaggccaacttattgcctaagggcgaccccgagcggagaagactgctgagcatcgtcgtcgtgggcggaggccccacaggtgtagaggctgctggtgagctacaggattatgtgcaccaggacctgagaaagttcctgcctgccttggccgaagaaatccagattcacctggtcgaagccctgcccatcgttttgaacatgttcgagaagaagctttcaagctacgcgcagagccatctggaaaacacctccatcaaagtacacctgagaaccgctgtggccaaggttgaagagaagcagctgctggcaaagaccaaacacgaagacggcaagattaccgaggaaactatcccctacggcactttgatttgggccacgggtaacaaggccagacccgtgatcacagacctgttcaagaagatccccgagcaaaacagcagcaagcggggattggccgtgaacgacttcctgcaggtcaaaggcagcaacaacattttcgccattggcgacaatgcctttgccgggctgcctcctaccgcccaggtggcccaccaggaggccgagtacctggccaagaatttcgataagatggctcagatcccaaatttccagaagaacctatcctccagaaaggataaaatcgatctcttgttcgaggaaaacaactttaaacccttcaaatacaacgacctgggtgccctggcatacctgggcagcgaaagggccattgccaccataagatccggtaagcggaccttctacaccggtggaggcttaatgaccttctacctgtggagaatcatctacctgtccatgattctgagcgcacgcagcagactgaaggtcttcttcgactggattaaattagcatttttcaaaagagacttcttcaagggcctgtga

SEQ ID NO: 922 - DNA, 1542 bp, Artificial Sequence
  source: /note="Description of Artificial Sequence: Synthetic polynucleotide"
atgctaagcaagaatctgtacagcaacaagcggctgctcaccagcaccaacacgctcgtgagattcgcttccaccagatccaccggggtcgaaaacagcggagcaggccccaccagcttcaagaccatgaaggtcattgacccccagcacagcgacaagcccaacgtgctgatactgggttctgggtggggagccatcagctttctgaagcacatcgacaccaagaagtacaacgtctccatcatctctcctagaagctatttcatctacacccctctgctgccctctgcacctgtgggaacagtggacgagaagtccatcatcgagcccatcgttaactttgccctcaagaaaaagggcaacgttacctactatgaggcagaagccaccagcatcaaccccgaccggaataccgttaccatcaagtcactgtctgccgtgtcccagctgtaccagcctgaaaaccatctgggcctgcaccaggccgagcctgccgaaattaagtacgactatctgatcagcgccgtgggcgccgagcctaacacatttggtattcctggcgtcaccgattacggccatttcctgaaagaaattcccaacagcctggaaatcagacggaccttcgccgccaacctagagaaggccaacttattgccaaagggcgaccccgagagaagaaggctactgagcattgtggtcgtgggtggaggccccacaggcgtggaggctgctggcgagctgcaggactatgtgcaccaggacctgagaaagttcctgcctgcactggccgaggaaatccaaattcacctggtggaagccctgcccatcgtgctgaacatgtttgagaagaagctgagcagctacgcccagagccacttagaaaacacctcgatcaaggtgcatctgagaaccgccgtcgccaaagttgaagaaaagcagttgttggcaaagaccaaacacgaggacggtaaaattaccgaggaaactatcccctacggcactctgatttgggccacgggcaacaaggccagacccgtgatcacagaccttttcaagaaaatccccgagcagaactcgagcaagcggggcctggcagtgaatgactttttgcaagtgaaaggcagcaacaacatcttcgccatcggtgacaatgcctttgctggcctgccaccaacagcccaggtggcccaccaagaagccgagtacctggccaagaattttgacaaaatggctcaaatacccaatttccagaagaacctgtcctccagaaaggataagattgacctgttgttcgaggagaacaactttaagcctttcaagtacaacgatttaggtgccttagcctacctgggcagcgaaagagccattgcaaccataagaagcggcaagagaacattctacaccggcggaggcctgatgaccttctacttatggcggatcctgtacctgtccatgatcctgagcgcccgctcgagattaaaggtgttcttcgactggatcaagttagcattcttcaaaagggacttctttaaaggcctgtga

SEQ ID NO: 923 - DNA, 1542 bp, Artificial Sequence
  source: /note="Description of Artificial Sequence: Synthetic polynucleotide"
atgctgagcaagaacttgtacagcaacaagcggctgctgacctcgaccaataccctcgtgcgcttcgccagcaccagatccacaggcgtcgaaaactccggggctggccccacctctttcaagaccatgaaaatcattgacccccagcacagcgacaaacccaacgtgctgatcctgggctcggggtggggcgccatctcgtttctgaagcacatcgacaccaagaagtacaacgtcagcatcgtgtctcctagaagctatttcctgttcacgcctctgttacccagcgcaccagtgggaacagtagacgaaaagtccattatcgagcccatcgttaactttgccctgaagaaaaagggcaacgtcacctactacgaggccgaggccaccagcatcaaccccgaccggaataccgtgaccataaaaagcttatctgccgtttcccagctataccagcctgagaaccacctgggcctgcaccaggcagaacccgccgaaattaagtacgactacctgatcagcgctgtaggcgcggaacccaacacatttggtattcctggcgtcaccgattacggccacttcctgaaagagatccccaacagcctggaaatccggcggaccttcgccgccaacctagaaaaggctaacctgctgcctaagggcgaccccgagagaagaaggctgctgagcatcgtcgtcgtgggcggagggcctactggcgtagaggctgctggcgaactgcaggactatgtgcaccaggacctgcggaagtttctccccgcactggccgaggaagtccaaattcacttggtggaagctctgcccatcgttttgaatatgtttgagaagaagctgagctcatacgcccagagccacttagaaaacacctcgatcaaggtacacctgagaaccgctgtggccaaagtggaagaaaagcagttgctggccaagaccaagcacgaagacggcaagattaccgaagaaactatcccatacggtactctgatttgggccaccggcaacaaggcaagacccgtgatcaccgaccttttcaagaaaatccccgagcagaactcgagcaagagaggactggccgtgaacgacttcttgcaagtgaaaggcagcaacaacatcttcgccatcggtgacaatgcctttgccggcttgccacctacagcccaggtggcccaccaggaggccgaatacttggccaagaacttcgacaaaatggcccaaatacccaatttccagaagaatctatcctcaagaaaggataagatcgacctgctgttcgaggaaaacaactttaagcccttcaagtacaacgatttaggtgccttagcatacctgggctccgaaagagccattgccaccatacgttccggcaagcggacattctacaccggcggaggcctgatgaccttctacctgtggcggatcttgtacatgtccatgattctatctgcaagaagcagactgaaggtgttcttcgactggatcaaactggccttcttcaagagggacttttttaagggattatag

SEQ ID NO: 924 - DNA, 1542 bp, Artificial Sequence
  source: /note="Description of Artificial Sequence: Synthetic polynucleotide"
atgctgagcaagaacttgtatagcaacaagcggttgctcaccagcacgaacacgctcgtgcgcttcgcctccaccagatccaccggggtggaaaacagcggggcaggccccaccagctttaagaccatgaaggtcatcgaccctcagcacagcgacaagcccaacgtgctgatcctgggctctgggtggggcgccatctcgtttttaaagcacattgacaccaagaagtacaacgtttccatcatcagccccagaagctatttcatctacacccccctgctgcctagcgccccagttggaacagtagacgaaaagtccattattgagcccatcgtgaactttgctctcaagaaaaagggcaacgtcacctactatgaggccgaagccaccagcatcaatcccgaccggaataccgtgaccataaagagcctgagcgccgttagccagctgtaccaacccgagaaccatctgggcctgcaccaggccgaacccgctgaaattaagtacgactacctgatcagcgctgtaggtgccgagcccaacacctttggaattcccggcgtcaccgattacggtcacttcctgaaagagattcccaacagcttggaaatccggcggacctttgccgccaacctggagaaggccaacctgctgccaaagggcgatcccgagagaagaaggctgctgagcatcgtggtggttggcggaggccccactggcgtggaagccgctggcgaactacaggactacgtgcaccaggacctgcggaagttcctgcccgccttggccgaagaagtccaaattcacttggtggaagccctgcccatcgttttgaacatgttcgagaaaaagctgagcagctacgcgcagagccatctggaaaacacctccatcaaagtacacctgagaaccgccgtcgccaaggtggaagaaaagcaactgttggccaagacgaagcacgaagacggcaaaataaccgaagaaactatcccctacggtaccctgatttgggccaccggtaacaaggcaagacccgtgatcaccgaccttttcaagaaaatccctgagcagaacagctccaagcggggattggcagtgaacgacttcctgcaggtgaaaggcagcaacaacattttcgccatcggtgacaatgcatttgccggcctgccaccaaccgcccaggtggcccaccaagaagccgagtatctggccaagaactttgataagatggctcagataccaaatttccagaagaacctgtcctcaagaaaggataaaattgatctgctgttcgaggagaacaactttaagcccttcaaatacaacgacctgggtgccctggcctacctgggcagcgaaagagccattgccaccatcagaagcggtaagcggacattctacaccggcggtggcctgatgaccttctacctgtggagaattctgtacatgagcatgatcctgtctgcacgctcgagattaaaggtgtttttcgactggatcaaactggccttcttcaagagggacttctttaagggcctgtga

SEQ ID NO: 925 - DNA, 1542 bp, Artificial Sequence
  source: /note="Description of Artificial Sequence: Synthetic polynucleotide"
atgctgagcaagaatctgtacagcaacaagaggctgctcaccagcaccaataccctcgtgcgcttcgctagcaccagatccacaggggtcgaaaactccggggcaggccccacaagctttaagaccatgaaggtcatcgaccctcagcacagcgacaagcccaacgtgctgatcctgggttctggctggggcgccatctcgtttctgaagcacatcgacaccaagaagtacaacgtttccatcatctctcccagaagctacttcatcttcacgcctctgttaccctctgccccagttggaaccgtagacgaaaagtccattattgagcccatcgtgaacttcgctctgaagaaaaaggggaacgtcacctactatgaggcagaggccacctctatcaatcccgaccggaataccgttaccatcaaaagcttatctgccgtgagccagctataccagcccgaaaaccacctggggctgcaccaggccgagcctgccgaaattaagtacgattatctgatcagcgccgtgggtgcggagcccaacacctttggaatccccggggtgaccgattacggtcatttcctgaaagagatccccaactctctggaaatcagacggacttttgccgccaacctggaaaaggccaacttattgccaaagggcgatcccgaaagaagaaggctgctgagcattgtcgtcgtgggcggaggccccacaggcgtggaggccgctggcgaactgcaggactacgtgcaccaggacctgagaaagttcctccctgccttggccgaagaaatccaaattcacctggtggaagccctgcccatcgtgttgaacatgttcgagaaaaagctgagcagctacgcccagtcacatctggaaaacacctccatcaaggtgcatctgagaaccgctgtggccaaagttgaagaaaagcagctgctggccaagaccaagcacgaagacggtaagataaccgaagaaactatcccatacggcaccctgatttgggccaccggcaacaaggccagacccgtgatcacagaccttttcaagaagatccccgagcaaaacagctccaagcggggactggcagtgaacgacttcctgcaagtgaaaggcagcaacaacattttcgccatcggtgacaacgcctttgctgggctgcctcctaccgcccaggtggcgcaccaggaagccgagtacttggccaagaacttcgataagatggctcaaatccccaatttccagaagaacctgtcttcacggaaggataagattgacctgctgttcgaggagaacaactttaagcccttcaaatacaacgacctgggcgccctggcctacctgggaagcgaaagggccattgccaccatacgtagcggcaagcggaccttctacaccggcggaggcttaatgaccttctacctgtggagaatcatctacatgagcatgattctgagcgcccgctcgagactgaaggtgttcttcgactggattaagttagccttcttcaaaagagacttttttaaaggactgtga

SEQ ID NO: 926 - DNA, 1542 bp, Artificial Sequence
  source: /note="Description of Artificial Sequence: Synthetic polynucleotide"
atgctgtcgaagaacctgtacagcaacaagcggttgctgacctcgaccaacacgctcgtgagattcgcctccaccagatccacaggcgtcgaaaactccggggctggtcccacaagcttcaagaccatgaaagtcatcgacccccagcacagcgacaagccaaacgtgctgatcctgggctcggggtggggcgccatttcgtttttaaagcacatcgacaccaagaagtacaacgtctccatcatcagccctagaagctatttcatctacacccccttgctgccttctgcccctgttggaacagtagacgaaaagtccatcatcgagcccatcgtgaactttgccctgaagaaaaagggcaacgttacctactacgaggcagaggccaccagcatcaaccccgaccggaataccgttaccatcaagagcctgagcgccgtgagccagctgtaccaacccgagaaccatctgggcctgcaccaggcagaacccgctgaaattaagtacgattacctgatcagtgctgtaggcgccgaacctaacacatttggtattcccggcgtcaccgattacggccatttcctgaaagaaatccccaacagcttggaaatccggcggaccttcgccgccaacctggaaaaggccaacctgttgcctaagggtgaccccgagcggagaaggctactgtccatcgtggtcgtgggcggtggccctactggtgtggaagctgctggtgaactgcaggattatgttcaccaggacctgcggaagttcctgcccgccttggccgaggaaatccaaattcacctggtggaagctctgcccatcgtgctgaatatgtttgagaagaagcttagcagctacgcccaaagccacctggaaaacacttccatcaaggtgcacctgagaacggctgtcgccaaggttgaagagaagcagttgctggcaaagacgaagcacgaggacggcaagattaccgaagaaaccattccatacggtactctgatttgggccaccggcaacaaggccagaccggtaatcacagacctgttcaagaaaatccctgagcagaacagcagcaagcggggattggccgtgaatgacttcctgcaggtgaaaggcagcaacaacatcttcgccatcggcgacaacgcctttgctggcttgcctccaacagcccaggtggcccaccaagaggccgaatatctggccaagaacttcgataagatggcccagatccccaatttccagaagaacctatcctcacggaaggataaaatcgacctgctgttcgaggaaaacaacttcaaacctttcaaatacaacgacctgggcgccctggcctacctgggatccgaaagagccattgccaccatccgttccggtaagagaacattctacaccggcggaggcttaatgaccttctacttatggagaattttgtacatgagcatgatcctatctgcacgctcgagactgaaggtgtttttcgactggatcaagttagcattcttcaagagagacttcttcaagggcctgtga

SEQ ID NO: 927 - DNA, 1542 bp, Artificial Sequence
  source: /note="Description of Artificial Sequence: Synthetic polynucleotide"
atgctaagcaagaatctgtatagcaacaagcggttgctgacctcgaccaataccctagtccgcttcgcctccaccagatccaccggggtggaaaactccggggctggccccaccagcttcaagaccatgaagatcatcgacccccagcacagcgacaaacccaacgtgctgatactgggttcggggtggggcgctatcagctttctgaagcacattgacaccaagaagtacaacgtctccatcgtgagccctagaagctacttcctgtttacccccttgctgcccagcgcccctgttgggaccgtggacgagaagtccatcattgagcccatcgtgaactttgccctgaagaaaaagggcaacgtcacctactacgaggccgaagccaccagcatcaaccccgaccggaacaccgtgaccataaagagcttatctgccgtgagccagctgtaccaacccgagaaccacctgggcctgcatcaagcagagcctgctgagattaagtacgactatttaatcagcgctgtaggcgcggagcccaacacatttggtattcccggcgtgaccgactacggccatttcctgaaggaaattcccaactctctggaaatcagacggactttcgccgccaacctggagaaggccaacttactgcctaagggtgatcccgagagaagaaggctactgtccattgtggtggttggcggaggccccactggcgtggaagccgctggcgagctgcaggattacgttcaccaggacctgcggaagttcctccctgccttggccgaagaaatccagattcacctggtcgaagccctgcccatcgtgttgaacatgttcgagaaaaagctgagcagctacgcccagagccatctggaaaacacctcgatcaaggtacatctgagaaccgccgtggccaaggtggaagaaaagcaactgctggcaaagacgaagcacgaggacggtaagataaccgaggaaactatcccatacggcaccctgatttgggccaccggtaacaaggccagaccggtgatcacagaccttttcaagaaaattcctgagcaaaacagcagcaagcggggcctggcagtgaacgacttcctgcaagtgaaaggcagcaacaacatcttcgccatcggcgacaacgcctttgccggcctgccacctaccgcccaggtggcccaccaggaggccgaatacctggccaagaattttgacaaaatggcccagatcccaaatttccagaagaacctatcttccagaaaggataaaatcgacctcctgttcgaggaaaacaacttcaaacccttcaagtacaacgatttaggcgccttagcctacctgggctccgaaagggccattgccaccataagaagcggcaagagaacattctacaccggcggaggcctgatgaccttctacctgtggcggatcttgtacatgagcatgattctgagcgccagaagcagactgaaggtcttcttcgactggatcaagctggccttcttcaaaagggacttttttaaaggactgtag

SEQ ID NO: 928 - DNA, 1542 bp, Artificial Sequence
  source: /note="Description of Artificial Sequence: Synthetic polynucleotide"
atgctaagcaagaacctgtatagcaacaagcggctgctcaccagcacgaataccctagtgcgcttcgcttccaccagatccaccggggtcgaaaacagcggagctggccctacctcttttaagaccatgaaggtcattgacccccagcacagcgacaagcccaacgtgctgatcctgggctcgggctggggcgccatcagctttctgaagcacatcgacaccaagaagtacaacgttagcatcgtgagccccagaagctacttcatctacacgcccttgttacccagcgcacctgttgggacagtggacgaaaagtccatcatcgagcccatcgtgaacttcgctctcaagaaaaagggcaacgttacctactatgaggccgaggccaccagcatcaaccccgaccggaacaccgttaccataaagtcactgtctgccgttagccagctataccagcccgaaaaccacctgggcctgcatcaggcagaacctgccgaaattaagtacgactatctgatcagcgctgtgggtgccgagcccaacacctttggtatccctggggtcactgactacggccacttcctgaaggaaatccccaacagcctggaaatccggcggactttcgccgccaacctagagaaggccaacttactgcctaagggtgaccccgagcggagaaggctactgagcattgtcgtggtgggtggaggccccacaggcgtggaagctgctggtgagctgcaggattatgtgcaccaggacctgagaaagttcctccctgcattggccgaggaagtgcaaattcacctggtggaagccctgcccatcgttctgaacatgttcgagaaaaagctgagctcatacgcccaaagccacttagaaaacacttcgatcaaagtacacctgagaaccgccgtcgccaaggtggaagaaaagcagttgctggccaagaccaaacacgaggacggtaagataaccgaagaaaccattccatacggcaccctgatttgggccacgggtaacaaggcaagacccgtaatcaccgacctgttcaagaagattcccgagcagaacagctccaagcggggcctggccgtgaatgacttcctgcaggtcaaaggcagcaacaacattttcgccatcggcgacaacgcatttgccgggctgccaccaaccgcccaggtggcccaccaagaggccgagtacttggccaagaacttcgataagatggctcaaatccccaatttccagaagaatctgtcctcccggaaggataagatcgacctcttgttcgaggagaacaacttcaagcccttcaaatacaacgacttaggcgccctggcatacctgggctccgaaagagccattgcaaccatcagatccggcaagcggacattttacaccggcggaggcctgatgaccttctacctgtggagaattatctacctgagcatgatcctgagcgcccgcagcagactgaaggtctttttcgactggattaagctggcattcttcaagagagacttctttaagggattatga

SEQ ID NO: 929 - DNA, 1542 bp, Artificial Sequence
  source: /note="Description of Artificial Sequence: Synthetic polynucleotide"
atgctaagcaagaatctgtatagtaacaagaggctgctgaccagcaccaacaccctagtgagattcgccagcaccagatccaccggcgtcgaaaacagcggagctggccctacctcttttaagaccatgaaagtcattgaccctcagcacagcgacaaacccaacgtgctgatcctgggttctggctggggcgctatctcgtttctgaagcacatcgacaccaagaagtacaacgtctccatcatcagccccagaagctatttcatctacacccccctgttacctagcgccccagttggaaccgtggacgaaaagtcaatcatcgagcccatcgttaacttcgctctcaagaaaaagggcaacgtcacctactacgaggccgaagccacctctatcaaccccgacaggaacaccgtgaccatcaaaagcctgtctgccgtttcccagctgtaccagcccgaaaaccacctgggcctgcaccaggcagagcctgccgagattaagtacgactatttaatcagcgctgtaggcgccgagcctaacacatttggaatccccggggtcaccgactacggccacttcctgaaggaaattcccaacagcttggaaataagacggacctttgccgccaacctagaaaaggctaacctgctgcctaagggcgaccccgaaagaagaagactactgagcattgtggtcgtgggtggaggccccacaggcgtagaggctgctggcgagctacaggattatgtgcaccaggacctgcggaagttcctgcccgccttggccgaggaaatccagattcacttggtcgaagccctgcccatcgtgttgaacatgttcgagaagaagctttcatcatacgcccaaagccatctggaaaacacctcgatcaaggtgcatctgagaacggctgtggccaaagtggaagagaagcagctgctggccaagaccaaacacgaagacggcaagattaccgaggaaaccatcccctacggtaccttgatttgggccaccggtaacaaggccagacccgtgatcaccgacctgttcaagaagatccctgagcagaacagcagcaagagaggcctggccgtgaatgacttcctgcaagtgaaaggcagcaacaacattttcgccatcggtgacaacgcatttgccggcctgcctcctacagcccaggtggcccaccaagaggccgaatacctggccaagaactttgacaagatggctcagatacccaatttccagaagaacctatcctcacggaaggataagattgatctcctgttcgaggagaacaactttaagcccttcaagtacaacgacttaggcgccttagcctacctgggaagcgaaagagccattgccaccatcagatccggtaagcggacattttacaccggtggaggcctgatgaccttctacttatggcggattttgtacatgtccatgatcctgtctgccagatcgagactgaaggtgttcttcgactggattaagctggcattcttcaagagagactttttcaaaggattatag

SEQ ID NO: 930 - DNA, 1542 bp, Artificial Sequence
  source: /note="Description of Artificial Sequence: Synthetic polynucleotide"
atgctaagcaagaatctgtatagcaacaagcggttgctcaccagcaccaacaccctcgtgagattcgctagcaccagatccacaggggtggaaaactccggggcaggccctaccagcttcaagaccatgaaaatcatcgaccctcagcacagcgacaagccaaacgtgctgatcctgggctctgggtggggagctatttcgtttttaaagcacatcgacaccaagaagtacaacgttagcatcatcagccccagaagctatttcatcttcacccctttgctgcctagcgcccctgtggggaccgtagacgagaagtccattatcgagcccatcgttaacttcgctctcaagaaaaagggcaacgtcacctactacgaggcagaggccacctctatcaatcccgaccggaataccgttaccatcaagagcctgagcgccgtgtcccagctgtaccaacccgagaaccacctgggcctgcaccaggccgaacctgctgagattaagtacgactatctgatcagcgctgtgggtgccgagcctaacacctttggaattcccggggtgaccgactacggccatttcctgaaggagatccccaactctttggaaatcagaagaaccttcgccgccaatctggagaaggctaacctgctgcctaagggtgaccccgagagaagaaggctgctgtccatcgtggtggttggtggtggccccacaggcgtggaagccgctggtgaactacaggactacgtgcaccaggacctgagaaagtttctccccgccttggccgaggaagtccagattcacttggtggaagctctgcccatcgttctgaacatgttcgagaaaaagctgagcagctacgcgcagagccatctggaaaacacctccatcaaagtgcatctgagaacggccgtcgccaaagtggaagaaaagcagttgctggcaaagaccaagcacgaggacggtaagataaccgaggaaaccattccctacggcaccctgatttgggccaccggcaacaaggcaagacccgtgatcaccgacctgttcaagaagattcctgagcagaactcgagcaagcggggcctggccgtgaacgactttctgcaggtcaaaggcagcaacaacatcttcgccattggcgacaacgcctttgccgggttgccacctaccgcccaggtggcccaccaggaggccgagtatttggccaagaattttgataagatggctcagatccccaatttccagaagaatctgtcctcacggaaggataagatcgacctgttgttcgaggaaaacaacttcaagcccttcaagtacaacgatctgggtgccttagcctacctgggcagcgaaagggccattgccaccatccgttccggtaagcggaccttttacaccggcggaggcttaatgaccttctacctgtggcggattatctacatgagcatgatcctgtctgcacgcagcagattaaaggtgtttttcgactggatcaagctggcattcttcaaaagggacttctttaaaggcttatga

SEQ ID NO: 931 - DNA, 1542 bp, Artificial Sequence
  source: /note="Description of Artificial Sequence: Synthetic polynucleotide"
atgctaagcaagaacctgtacagtaacaagcggttgctgaccagcacgaacaccctagtcagattcgcctccaccagatccaccggggtcgaaaacagcggggcaggccctacaagcttcaagaccatgaaagtcatcgacccccagcacagcgacaagcccaacgtgctgatcctgggctcgggctggggcgccatcagctttctgaagcacatcgacaccaagaagtacaacgttagcatcatctctcctagaagctatttcatctacacgcctctgctgcccagcgcacctgttggaacagtggacgagaagtcaattattgagcccatcgtgaacttcgctctcaagaaaaagggcaacgtcacctactacgaggcagaggccaccagcatcaatcccgaccggaataccgtgaccataaagagcttatctgccgttagccagctgtaccaacccgaaaaccacctggggctgcatcaggccgagcccgctgaaattaagtacgactatttaatcagtgccgtgggcgccgaacccaacacatttggtattcccggggtcactgattacggtcatttcctgaaagagatccccaactctctggaaatccggagaactttcgccgccaatctagagaaggccaacttactgcctaagggtgaccccgaacggagaagactgctgagcatcgtggtcgttggtggtggccccactggcgtggaagctgctggcgagctgcaggattacgttcaccaggacctgcggaagttcctgcccgcattggccgaagaaatccagattcacttggtggaagccctgcccatcgttctgaacatgttcgagaagaagcttagcagctacgcccaaagccacttagaaaacacctccatcaaagtgcatctgagaaccgccgtcgccaaagttgaagaaaagcaactgttggcaaagaccaaacacgaggacggcaagattaccgaggaaaccatcccctacggcactctgatttgggccaccggcaacaaggcaagacccgtaatcacagacctgttcaagaaaattcccgagcagaacagcagcaagagaggactggcagtgaacgacttcctgcaggtcaaaggcagcaacaacatcttcgccatcggcgacaatgcctttgccggcttgcctccaacagcccaagtggcccaccaggaagccgagtatctggccaagaatttcgataaaatggctcaaatacccaatttccaaaagaacctgtcttcccggaaggataaaatcgatctcctgttcgaggaaaacaacttcaagcctttcaagtacaacgacctgggcgccctggcatacctgggctccgaaagggccattgcaaccatcagaagcggcaagcggaccttttacaccggtggaggcctgatgaccttctacctgtggcggattctgtacatgtccatgatcctgagcgcaagatcgagactgaaggtctttttcgactggatcaaactggccttcttcaagagggacttcttcaagggcctgtga

SEQ ID NO: 932 - DNA, 1542 bp, Artificial Sequence
  source: /note="Description of Artificial Sequence: Synthetic polynucleotide"
atgctaagcaagaacctgtacagtaacaagaggttgctgaccagcaccaataccctagtgcgcttcgcctccaccagatccaccggggtggaaaacagcggagctggccccacctcttttaagaccatgaaaatcatcgacccccagcacagcgacaaacccaacgtgctgatcctgggctctgggtggggcgctatcagctttttaaagcacatcgacaccaagaagtacaacgtcagcatcgtgagccctagaagctacttcctgttcacccctctgctgccttctgcccctgttgggacagtggacgagaagtccatcatcgagcccatcgtgaacttcgccctgaagaaaaagggcaacgtcacctactatgaggccgaggccaccagcatcaaccccgacaggaataccgtgaccatcaagtcattatctgccgtgtcccagctgtaccaacccgagaaccatctaggcctgcaccaagcagagcccgccgagattaagtacgactacttaatcagcgctgtaggcgcggagcccaacacctttggaatccctggcgtgaccgactacggccatttcctgaaggaaatccccaactctctggaaatacggcggacttttgccgccaacctggaaaaggctaacctgttgccaaagggtgaccccgagagaagaaggctactgtccatcgtcgtggttggcggaggccccactggcgtggaggctgctggtgaactgcaggattatgtgcaccaggacctgcggaagttcctgcccgccctggccgaagaagtgcagattcacctggtcgaagctctgcccatcgtgttgaatatgttcgagaaaaagctgtcatcatacgcgcaatcacatctggaaaacacctcgatcaaggtacatctgagaacggctgtggccaaagtggaagaaaagcaactgctggccaagacgaagcacgaggacggtaaaataaccgaggaaactatcccctacggcaccctgatttgggccacgggcaacaaggccagaccggtgatcaccgaccttttcaagaagattcctgagcagaacagcagcaagcggggattggccgtgaacgactttctgcaggtcaaaggcagcaacaacattttcgccattggtgacaacgcatttgctggcttgcctccaacagcccaggtggcgcaccaggaggccgagtatctggccaagaacttcgacaaaatggcccaaatccccaatttccaaaagaacctatcttcaagaaaggataagattgacctgctgttcgaggaaaacaacttcaagcctttcaagtacaacgatctgggcgccttagcatacctgggctccgaaagagccattgcaaccatcagatccggtaagcggaccttctacaccggcggtggcttaatgaccttctacctgtggcggatcatctacatgagcatgatcctgtctgcccgcagcagactgaaggtgtttttcgactggatcaagctggcattcttcaaaagggacttctttaagggcctgtga

SEQ ID NO: 933 - DNA, 1542 bp, Artificial Sequence
  source: /note="Description of Artificial Sequence: Synthetic polynucleotide"
atgctgagcaagaatttgtatagtaacaagaggctgctcacctcgaccaatacgctcgtgcgcttcgctagcaccagatccacaggcgtggaaaacagcggagcaggtcccaccagcttcaagaccatgaaaatcattgaccctcagcacagcgacaaaccaaacgtgctgatactgggctctggctggggcgccatttcgtttttaaagcacatcgacaccaagaagtacaacgttagcatcgtgagccccagaagctatttcctgtacacccctttgctgcccagcgcaccagtggggacagtggacgagaagtccattatcgagcccatcgtgaacttcgccctgaagaaaaaggggaacgtcacctactatgaggccgaggccacctctatcaatcccgaccggaacaccgtgaccatcaaaagcctgtctgccgtttcccagctataccagcccgagaaccacctgggcctgcatcaggcagagcctgccgaaattaagtacgattacctgatcagcgccgtaggcgccgagcccaacacctttggaatccctggcgtgaccgattacggtcatttcctgaaagagatccccaacagcctggaaataagacggaccttcgccgccaatctggaaaaggctaacttattgccaaagggcgatcccgaaagaagaaggctgctgtccatcgtggtggtgggcggaggccccactggtgtggaagctgctggtgaactacaggactacgtgcaccaggacctgcggaagttcctgcctgcactggccgaagaagtgcagattcacctggtcgaagccctgcccatcgtgctgaatatgttcgagaaaaagctgtcaagctacgcgcagtcacacttagaaaacacctccatcaaagtacacctgagaaccgccgtcgccaaggtggaagagaagcaactgttggccaagaccaagcacgaggacggcaagataaccgaagaaaccatcccctacggtaccttgatttgggccacgggcaacaaggccagacccgtgatcacagacctgttcaagaaaattcctgagcagaacagctccaagagaggcttggccgtgaacgactttttgcaggtcaaaggcagcaacaacattttcgccatcggcgacaacgcctttgccggcttgcctcctacagcccaggtggcccaccaagaagccgagtatctggccaagaattttgacaagatggcccaaatccccaatttccaaaagaatctgtcttcacggaaggataagatcgacctgctgttcgaggaaaacaacttcaagcctttcaagtacaacgacttaggtgccctggcctacctgggaagcgaaagggccattgccaccatccgttccggtaagcggaccttttacaccggtggtggcctgatgaccttctacctgtggcggatcttgtacatgtccatgatcctgtctgcacgctcgagactgaaggtcttcttcgactggattaagctggccttcttcaaaagggactttttcaaaggactgtga

SEQ ID NO: 934 - DNA, 1542 bp, Artificial Sequence
  source: /note="Description of Artificial Sequence: Synthetic polynucleotide"
atgctaagcaagaatttgtatagcaacaagaggttgctgacctcgaccaataccctcgtgcgcttcgcctccaccagatccaccggggtcgaaaactccggggctggtcccacctctttcaagaccatgaagatcattgaccctcagcacagcgacaaacccaacgtgctgatactgggttcgggctggggagctatcagctttctgaagcacatcgacaccaagaagtacaacgtcagcatcatctctcccagaagctacttcctgtacacccctctgctgccttctgcaccagttgggaccgtagacgaaaagtccatcatcgagcccatcgtgaatttcgctctgaagaaaaagggcaacgttacctactacgaggccgaagccaccagcatcaaccccgaccggaacaccgttaccataaagagcttaagcgccgtttcccagctataccaacctgaaaaccatctgggcctgcaccaagccgagcctgccgaaattaagtacgattacctgatcagcgccgtgggtgccgaacccaacacatttggaattcccggggtgactgactacggccacttcctgaaagagattcccaacagcttggaaatccggcggacctttgccgccaacctggaaaaggccaacttactgccaaagggtgaccccgaacggagaaggctactgtccatcgtcgtcgttggcggtggccctacaggcgtggaagctgctggtgaactgcaggactatgttcaccaggacctgagaaagttcctccccgcattggccgaggaaatccagattcacctggtggaagccctgcccatcgtgctgaacatgtttgagaagaagcttagctcatacgcccaaagccatttagaaaacacctccatcaaggtgcatctgagaaccgccgtcgccaaggttgaagagaagcaactgttggcaaagacgaagcacgaagacggcaaaattaccgaagaaaccattccctacggtaccctgatttgggccacgggtaacaaggccagaccggtaatcacagacctgttcaagaagatccccgagcaaaactcgagcaagcggggcttggcagtgaatgacttcctgcaggtgaaaggcagcaacaacatcttcgccattggcgacaatgcctttgccgggctgcctcctacagcccaagtggcgcaccaagaagccgagtacctggccaagaacttcgataagatggcccagatccccaatttccaaaagaacctgtcctccagaaaggataaaattgacctgctgttcgaggaaaacaacttcaaacccttcaagtacaacgacctgggcgccctggcctacctgggaagcgaaagggccattgccaccatccgtagcggtaagcggaccttctacaccggcggtggcctgatgaccttctacttatggcggatcttgtacatgagcatgatcctgtctgccagaagcagactgaaggtgttcttcgactggatcaagctggccttcttcaaaagggactttttcaagggactgtag

SEQ ID NO: 935 - DNA, 1542 bp, Artificial Sequence
  source: /note="Description of Artificial Sequence: Synthetic polynucleotide"
atgctaagcaagaatttgtatagcaacaagcggttgctcaccagcaccaacaccctagtccgcttcgccagcaccagatccaccggggtcgaaaactccggggctggccccacaagctttaagaccatgaagatcatcgaccctcagcacagcgacaagcccaacgtgctgatactgggctctgggtggggcgctatctcgtttctgaagcacatcgacaccaagaagtacaacgtttccatcgtgtctcccagaagctatttcatctacacgcccttgttacccagcgcacctgtgggaacagtggacgagaagtcaatcatcgagcccatcgtgaatttcgccctgaagaaaaagggcaacgtcacctactacgaggccgaggccaccagcatcaatcccgaccggaacaccgtgaccataaaatcactgtctgccgtgagccagctgtaccaacccgaaaaccacctaggcctgcaccaagccgagcctgccgagattaagtacgactacctgatcagcgccgtaggcgcggagcccaacacctttggaatccccggcgtgaccgactacggtcatttcctgaaggagatccccaacagcctggaaataagaagaaccttcgccgccaacctagagaaggctaacctgttgccaaagggtgatcccgaaagaagaagactgctgagcatcgtcgtcgttggtggtgggcccacaggcgtggaagctgctggtgagctacaggactacgttcaccaggacctgcggaagttcctgcccgccctggccgaagaagtccagattcacctggtggaagccctgcccatcgtgctgaacatgttcgagaagaagctttcatcatacgcccaatcacacctggaaaacacttccatcaaagtgcacctgagaaccgccgtggccaaggtggaagaaaagcaactgttggcaaagaccaaacacgaagacggtaagattaccgaggaaactattccatacggcactttgatttgggccaccggcaacaaggcaagaccggtaatcaccgacctgttcaagaagatccccgagcagaactcgagcaagagaggactggccgtgaacgacttcttgcaggtcaaaggcagcaacaacatcttcgccattggtgacaatgcctttgccggcctgccacctaccgcccaggtggcccaccaagaggccgagtatttggccaagaacttcgacaagatggcccagatacccaatttccaaaagaacctgtcctcacggaaggataagatcgacctgctgttcgaggaaaacaacttcaagcctttcaagtacaacgatctgggcgccctggcctacctgggctccgaaagagccattgcaaccatccgtagcggtaagcggacattctacaccggtggtggcttaatgaccttctacctgtggagaatcctgtacatgagcatgatcctatctgcccgcagcagactgaaggtcttcttcgactggattaaattagcctttttcaaaagagacttcttcaaaggattatag

SEQ ID NO: 936 - DNA, 1542 bp, Artificial Sequence
  source: /note="Description of Artificial Sequence: Synthetic polynucleotide"
atgctgagcaagaacctgtatagcaacaagaggttgctcacctcgaccaacaccctagtgcgcttcgctagcaccagatccacaggcgtcgaaaacagcggagctggccctacctctttcaagaccatgaagatcattgaccctcagcacagcgacaaaccaaacgtgctgatcctgggttcgggctggggcgccatctcgtttttaaagcacatcgacaccaagaagtacaacgttagcatcgtgagccccagaagctacttcatctacacccctctgttaccttctgccccagtgggaaccgtggacgaaaagtcaatcattgagcccatcgtgaacttcgccctgaagaaaaagggcaacgtcacctactacgaggcagaagccaccagcatcaaccccgaccggaacaccgtgaccatcaagagcttaagcgccgtgtcccagctgtaccaacctgagaaccatctaggcctgcatcaagccgaacccgccgaaattaagtacgactatctgatcagtgccgtaggtgccgaacctaacacatttggtattcccggcgtgaccgattacggccacttcctgaaagagattcccaactctctggaaataagacggaccttcgccgccaatctagaaaaggccaacctgttgcctaagggtgaccccgaacggagaaggctgctgagcattgtcgtcgtgggcggaggccccacaggtgtagaggctgctggcgaactgcaggactatgtgcaccaggacctgcggaagttcctgcccgccctggccgaggaagtgcaaattcacctggtcgaagccctgcccatcgtgctgaatatgtttgagaaaaagctgtcatcatacgcccagagccacctggaaaacacctccatcaaggtacacctgagaacggccgtggccaaagtggaagagaagcagttgctggcaaagaccaaacacgaagacggcaaaattaccgaggaaactattccctacggcaccttgatttgggccacgggtaacaaggcaagaccggtaatcaccgacctgttcaagaagatccctgagcagaactcgagcaagcggggcctggcagtgaacgacttcctgcaggtcaaaggcagcaacaacatcttcgccattggcgacaacgcatttgctgggttgcctcctaccgcccaggtggcgcaccaagaggccgagtacttggccaagaacttcgacaagatggcccaaatccccaatttccaaaagaacctgtcttcccggaaggataaaatcgatctcttgttcgaggaaaacaacttcaaacccttcaaatacaacgatctgggcgccctggcatacctgggcagcgaaagagccattgccaccatacgtagcggcaagagaacattctacaccggcggtggcctgatgaccttctacctgtggcggatcatctacctgagcatgatcctgtctgcaagaagcagattaaaggtctttttcgactggatcaagctggcatttttcaaaagggacttcttcaagggattatga

SEQ ID NO: 937 - DNA, 1542 bp, Artificial Sequence
  source: /note="Description of Artificial Sequence: Synthetic polynucleotide"
atgctgagcaagaacctgtatagcaacaagcggttgctgacctcgaccaacaccctagtgcgcttcgcctccaccagatccacaggggtggaaaacagcggggcaggccctaccagcttcaagaccatgaaggtcatcgaccctcagcacagcgacaagccaaacgtgctgatcctgggttcggggtggggcgctatctcgtttctgaagcacatcgacaccaagaagtacaacgttagcatcgtgagccccagaagctacttcttatacacgcccctgttacccagcgccccagttggaacagtggacgaaaagtcaatcattgagcccatcgttaacttcgccctgaagaaaaagggcaacgtcacctactacgaggccgaggccaccagcatcaaccccgacaggaacaccgttaccatcaaatcactgagcgccgttagccagctataccagcccgagaaccacctagggctgcatcaggccgagcccgccgagattaagtacgattacttaatcagcgctgtgggcgcggagcctaacacatttggaatccctggcgtgaccgattacggtcacttcctgaaggaaatccccaactctctggaaatccggagaacttttgccgccaatctagagaaggccaacctgctgccaaagggtgaccccgaaagaagaagactgctgagcattgtggtcgttggcggtggccccacaggtgtagaggctgctggcgagctacaggattatgtgcaccaggacctgcggaagtttctccccgccttggccgaagaaatccagattcacctggtggaagccctgcccatcgtgttgaacatgttcgagaagaagctgtcaagctacgcgcagagccacttagaaaacacctccatcaaggtgcacctgagaaccgccgtcgccaaagttgaagaaaagcaactgctggccaagacgaagcacgaagacggcaagataaccgaagaaactatcccctacggcaccctgatttgggccaccggtaacaaggcaagaccggtgatcaccgacctgttcaagaaaatccctgagcaaaacagcagcaagcggggcttggccgtgaatgacttcttgcaggtcaaaggcagcaacaacatcttcgccatcggcgacaacgcatttgccgggttgccacctacagcccaagtggcgcaccaggaagccgagtacctggccaagaattttgacaagatggcccaaatccccaatttccaaaagaacctgtcctcccggaaggataaaatcgacctgctgttcgaggaaaacaactttaagcctttcaagtacaacgatctgggcgccttagcctacctgggcagcgaaagagccattgccaccatcagatccggcaagcggacattctacaccggtggaggcctgatgaccttctacttatggagaatcatctacatgtccatgatcctgagcgcaagaagcagattaaaggtgttcttcgactggattaaattagcattcttcaagagagacttcttcaagggactgtag

SEQ ID NO: 938 - DNA, 1542 bp, Artificial Sequence
  source: /note="Description of Artificial Sequence: Synthetic polynucleotide"
atgctgagcaagaatctgtatagtaacaagcggctgctgaccagcacgaatacgctcgtcagattcgctagcaccagatccacaggcgtcgaaaactccggagctggtcccacatctttcaagaccatgaaaatcatcgacccccagcacagcgacaagcccaacgtgctgatcctgggctctggctggggcgctattagctttctgaagcacatcgacaccaagaagtacaacgtctccatcgtgagccccagaagctatttcttatacacccccctgctgcccagcgccccagtgggaaccgtggacgagaagtcaatcattgagcccatcgtgaactttgccctcaagaaaaagggcaacgtcacctactacgaggcagaagccaccagcatcaaccccgacaggaacaccgttaccatcaaatcattaagcgccgtttcccagctgtaccaacccgagaaccatctaggcctgcaccaagcagaacctgctgaaattaagtacgattacctgatcagcgctgtgggcgccgagcccaacacctttggaattcccggggtgaccgattacggccatttcctgaaggagatccccaacagcctggaaatacggcggacttttgccgccaacctagaaaaggctaacttactgcctaagggcgatcccgagagaagaagactgctgagcatcgtggtcgttggcggagggcctactggcgtagaagccgctggtgaactgcaggactacgtgcaccaggacctgagaaagtttctgcccgcactggccgaggaaatccagattcacctggtcgaagctctgcccatcgttctgaacatgttcgagaagaagcttagcagctacgcccagagccacctggaaaacacttccatcaaggtgcacctgagaacggccgtcgccaaagtggaagagaagcagttgctggcaaagaccaagcacgaagacggcaagataaccgaagaaaccatcccatacggcaccctgatttgggccaccggtaacaaggccagacccgtgatcaccgaccttttcaagaagattcctgagcaaaacagcagcaagagaggactggcagtgaacgacttcctgcaagtgaaaggcagcaacaacatcttcgccatcggcgacaacgcctttgccgggttgccacctacagcccaggtggcgcaccaggaggccgaatatctggccaagaatttcgacaagatggcccagatccccaatttccagaagaatctgtcttcccggaaggataagatcgatctgctgttcgaggagaacaacttcaagcctttcaaatacaacgatttaggtgccttagcatacctgggatccgaaagagccattgccaccatccgttccggcaagcggacattctacaccggcggtggcctgatgaccttctacttatggagaattctgtacatgagcatgattctaagcgcccgctcgagactgaaggtgttcttcgactggatcaagctggcctttttcaagagggacttttttaagggactgtga

SEQ ID NO: 939 - DNA, 1542 bp, Artificial Sequence
  source: /note="Description of Artificial Sequence: Synthetic polynucleotide"
atgctgagcaagaacctgtatagcaacaagaggctgctgaccagcaccaacacgctagtgcgcttcgccagcaccagatccacaggcgtggaaaactccggggctggccctacaagcttcaagaccatgaaggtcattgacccccagcacagcgacaaacccaacgtgctgatactgggttctgggtggggcgccattagctttctgaagcacatcgacaccaagaagtacaacgtctccatcgtgagccccagaagctacttcatctacacccccttgttaccttctgccccagtgggaaccgtagacgagaagtcaattattgagcccatcgtgaactttgctctcaagaaaaagggcaacgtcacctactatgaggcagaggccacctctatcaaccccgacaggaacaccgtgaccatcaagtcactgagcgccgtttcccagctgtaccaacctgaaaaccacctgggcctgcaccaagccgaacctgccgagattaagtacgactacctgatcagtgctgtaggcgccgaacccaacacctttggaattcccggcgtgaccgactacggccacttcctgaaagagatccccaacagcctggaaatacggcggaccttcgccgccaatctggaaaaggctaacttactgcctaagggcgatcccgaaagaagaaggctgctgagcatcgtggtcgttggcggtgggcccacaggtgtggaggccgctggtgagctgcaggactacgttcaccaggacctgagaaagtttctgcccgccctggccgaggaagtgcaaattcacctggtcgaagccctgcccatcgtgttgaacatgttcgagaagaagctgtcaagctacgcgcaaagccacttagaaaacacctccatcaaggtgcatctgagaaccgctgtggccaaggttgaagaaaagcagctgctggccaagaccaagcacgaggacggtaaaattaccgaggaaactattccatacggtaccctgatttgggccaccggcaacaaggcaagaccggtaatcacagaccttttcaagaagattcccgagcaaaactcgtccaagagaggattggcagtgaatgactttttgcaagtcaaaggcagcaacaacatcttcgccattggtgacaatgcctttgctgggctgccacctaccgcccaagtggcccaccaagaagccgagtacttggccaagaatttcgacaagatggcccagatcccaaatttccagaagaacctgtcctccagaaaggataaaattgacctcctgttcgaggaaaacaacttcaaacctttcaaatacaacgatttaggtgccttagcctacctgggaagcgaaagagccattgcaaccatcagatccggcaagcggaccttctacaccggcggaggcttaatgaccttctacctgtggcggatcatctacatgagcatgatcctaagcgcacgcagcagactgaaggtgttcttcgactggatcaagctggccttcttcaagagggacttcttcaagggattatag

SEQ ID NO: 940 - DNA, 1542 bp, Artificial Sequence
  source: /note="Description of Artificial Sequence: Synthetic polynucleotide"
atgctaagcaagaatttgtatagtaacaagcggctgctcaccagcacgaacacgctcgtccgcttcgccagcaccagatccaccggggtcgaaaacagcggagcaggccccacaagctttaagaccatgaagatcatcgaccctcagcacagcgacaaacccaacgtgctgatcctgggctctggctggggagctatctcgtttctgaagcacattgacaccaagaagtacaacgtctccatcgtgtctcccagaagctatttcatctttacgcccctgctgcccagcgcccctgttggaaccgtagacgagaagtcaattatcgagcccatcgtgaatttcgccctgaagaaaaagggcaacgtcacctactacgaggccgaggccaccagcatcaaccccgaccggaataccgttaccatcaaaagcctgagcgccgtgagccagctgtaccagcctgagaaccatctaggcctgcatcaggccgaacctgccgaaattaagtacgactacctgatcagcgctgtaggtgccgagcctaacacctttggaatccctggcgtgaccgattacggtcatttcctgaaggagattcccaactctttggaaatacggagaaccttcgccgccaacctggaaaaggctaacttactgccaaagggtgatcccgagcggagaaggctgctgagcatcgtggtcgtgggtggtggccccacaggcgtagaagccgctggcgagctgcaggactacgtgcaccaggacctgcggaagtttctccccgcactggccgaggaagtgcaaattcacttggtggaagctctgcccatcgtgctgaacatgttcgagaaaaagctgagctcatacgcgcagtcacacctggaaaacacctcgatcaaggtgcacctgagaaccgccgtcgccaaagtggaagaaaagcaattgctggccaagacgaagcacgaagacggcaaaataaccgaagaaactattccatacggcaccctgatttgggccacgggtaacaaggccagacccgtgatcaccgaccttttcaagaaaatccccgagcaaaactcgagcaagcggggcttggcagtgaacgacttcctgcaggtcaaaggcagcaacaacattttcgccatcggcgacaatgcctttgccggcttgccacctacagcccaggtggcgcaccaggaagccgaatacctggccaagaacttcgataagatggctcaaataccaaatttccaaaagaacctatcttcccggaaggataagattgacctcttgttcgaggaaaacaacttcaagcctttcaaatacaacgacctgggtgccctggcctacctgggaagcgaaagggccattgccaccatcagaagcggtaagcggacattctacaccggcggaggcttaatgaccttctacctgtggagaatcatctacatgtccatgatcctgagcgcccgcagcagattaaaggtgttcttcgactggatcaaactggcattcttcaagagggacttttttaagggcttatga

SEQ ID NO: 941 - DNA, 1542 bp, Artificial Sequence
  source: /note="Description of Artificial Sequence: Synthetic polynucleotide"
atgctgtcgaagaacctgtacagtaacaagcggctgctcaccagcaccaacacgctagtgagattcgcctccaccagatccaccggggtcgaaaactccggggctggtcctacaagcttcaagaccatgaaaatcatcgacccccagcacagcgacaagcccaacgtgctgatactgggctctgggtggggcgccatcagctttctgaagcacattgacaccaagaagtacaacgtcagcatcgtgagccctagaagctacttcatcttcacccccctgctgcccagcgcccctgtgggaaccgtggacgagaagtccattattgagcccatcgtgaacttcgctctgaagaaaaaggggaacgttacctactatgaggccgaggccacctctatcaatcccgaccggaataccgtgaccataaaatcattatctgccgtttcccagctgtaccagcccgagaaccatctggggctgcatcaagccgaacccgccgagattaagtacgactacctgatcagtgctgtgggcgcggagcccaacacatttggtattcctggggtcactgactacggccacttcctgaaggagatccccaacagcttggaaatacggcggacctttgccgccaacctggaaaaggctaacttactgcctaagggcgaccccgaacggagaaggctgctgtccattgtggtcgtgggtggaggccctacaggcgtagaagccgctggtgagctgcaggactacgttcaccaggacctgcggaagttcctgcctgccttggccgaggaaatccaaattcacctggtggaagccctgcccatcgttttgaatatgtttgagaagaagcttagcagctacgcccaaagccacctggaaaacacctccatcaaggtgcatctgagaaccgctgtggccaaggtggaagagaagcagctgctggccaagaccaagcacgaagacggcaaaattaccgaggaaaccatcccatacggcaccttgatttgggccacgggtaacaaggcaagaccggtaatcacagaccttttcaagaagattcctgagcaaaactcgtccaagcggggcctggcagtgaacgactttctgcaagtcaaaggcagcaacaacattttcgccattggtgacaatgcatttgctggcctgccaccaacagcccaagtggcgcaccaggaagccgagtacctggccaagaatttcgacaagatggcccaaatccccaatttccaaaagaatctatcctcacggaaggataaaatcgatctgctgttcgaggaaaacaacttcaaacctttcaagtacaacgatttaggtgccctggcctacctgggaagcgaaagggccattgccaccataagatccggcaagcggaccttctacaccggcggtggcctgatgaccttctacctgtggcggatcatctacttgtccatgatcctgtctgcaagatcgagactgaaggtgttcttcgactggatcaagctggcatttttcaaaagagacttcttcaagggcctgtga

SEQ ID NO: 942 - DNA, 1542 bp, Artificial Sequence
  source: /note="Description of Artificial Sequence: Synthetic polynucleotide"
atgctatcgaagaacttgtacagcaacaagcggctgctcaccagcaccaataccctcgtgagattcgccagcaccagatccacaggcgtcgaaaacagcggggcaggccctacaagcttcaagaccatgaaaatcatcgacccccagcacagcgacaagcccaacgtgctgatactgggctctggctggggagctatctcgtttttaaagcacatcgacaccaagaagtacaacgtcagcatcgtgtctcctagaagctatttcctgtacacccccctgttacccagcgcacctgtgggaaccgtggacgagaagtccatcattgagcccatcgtgaatttcgccctcaagaaaaagggcaacgtcacctactacgaggcagaagccaccagcatcaaccccgacaggaacaccgtgaccatcaaatcattaagcgccgtgtcccagctgtaccagcccgaaaaccacctaggcctgcatcaggcagagcctgccgagattaagtacgactacttaatcagcgccgtaggtgccgaacccaacacctttggtatccctggggtgaccgactacggtcacttcctgaaggaaattcccaacagcttggaaatacggcggactttcgccgccaacctggaaaaggctaacttactgcctaagggtgaccccgaaagaagaaggctactgtccatcgtggtcgttggcggaggccctacaggcgtggaagctgctggcgagctacaggattacgttcaccaggacctgcggaagttcctgcccgcactggccgaggaaatccagattcacttggtcgaagccctgcccatcgtgttgaacatgtttgagaagaagcttagctcatacgcgcagtcacatttagaaaacacctccatcaaggtgcatctgagaaccgccgtggccaaagtggaagaaaagcagctgctggcaaagaccaagcacgaggacggtaagattaccgaagaaaccattccatacggcaccctgatttgggccaccggcaacaaggcaagaccggtaatcacagaccttttcaagaagatccctgagcagaacagcagcaagagaggattggccgtgaacgactttctgcaagtcaaaggcagcaacaacattttcgccattggtgacaacgcctttgccggcctgccacctacagcccaggtggcccaccaggaagccgaatacttggccaagaacttcgacaaaatggctcagatccccaatttccaaaagaacctgtcttcacggaaggataaaattgacctcttgttcgaggagaacaactttaagcccttcaagtacaacgatctgggcgccttagcctacctgggaagcgaaagagccattgccaccataagatccggtaagcggacattttacaccggcggaggcctgatgaccttctacttatggcggattttgtacatgtccatgatcctaagcgcacgcagcagattaaaggtgtttttcgactggattaagctggccttcttcaagagggactttttcaaaggcttatga

SEQ ID NO: 943 - DNA, 1542 bp, Artificial Sequence
  source: /note="Description of Artificial Sequence: Synthetic polynucleotide"
atgctaagcaagaacctgtatagcaacaagcggctgctgacctcgacgaacaccctagtccgcttcgcctccaccagatccaccggggtcgaaaacagcggggcaggccccacatcttttaagaccatgaaggtcattgacccccagcacagcgacaagcccaacgtgctgatactgggctcgggctggggcgctatctcgtttttaaagcacatcgacaccaagaagtacaacgtctccatcgtgagccctagaagctacttcatctttacgcccttgttaccctctgcccctgttggaaccgtggacgaaaagtccatcatcgagcccatcgttaacttcgccctcaagaaaaagggcaacgtcacctactatgaggccgaggccacctctatcaatcccgaccggaacaccgttaccatcaagtcactgagcgccgtgtcccagctgtaccaacctgagaaccacctggggctgcaccaggcagagcctgctgaaattaagtacgattatttaatcagcgctgtgggtgcggagcctaacacctttggaatccccggcgtcaccgattacggccacttcctgaaagaaatccccaacagcttggaaatccggcggacttttgccgccaacctggagaaggccaacctgttgccaaagggcgaccccgagcggagaaggctactgtccattgtggtcgtgggtggagggcccactggcgtagaggctgctggtgaactgcaggattacgtgcaccaggacctgagaaagttcctccccgccctggccgaggaaatccagattcacctggtcgaagctctgcccatcgtgttgaacatgtttgagaagaagctgtcaagctacgcccaatcacatctggaaaacacctcgatcaaggtgcatctgagaacggccgtggccaaagtggaagaaaagcagctgctggccaagaccaagcacgaggacggtaaaataaccgaggaaaccattccctacggcaccctgatttgggccaccggtaacaaggccagacccgtaatcacagacctgttcaagaagatccctgagcaaaacagctccaagcggggactggcagtgaatgacttcctgcaggtcaaaggcagcaacaacatcttcgccattggcgacaacgcctttgctggcctgcctcctacagcccaggtggcccaccaggaagccgagtatctggccaagaatttcgataagatggcccaaatccccaatttccagaagaatctgtcctcacggaaggataaaattgatctcctgttcgaggagaacaacttcaaacctttcaagtacaacgacctgggcgccctggcctacctgggaagcgaaagagccattgccaccatacgttccggtaagagaacattttacaccggcggaggcttaatgaccttctacctgtggcggatcatctacatgagcatgattctgagcgcacgcagcagactgaaggtgtttttcgactggatcaagctggcattcttcaagagggacttctttaaaggattatga

SEQ ID NO: 944 - DNA, 1542 bp, Artificial Sequence
  source: /note="Description of Artificial Sequence: Synthetic polynucleotide"
atgctgagcaagaatctgtatagtaacaagcggctgctcacctcgaccaacaccctcgtgcgcttcgctagcaccagatccaccggggtcgaaaacagcggagctggtcctaccagcttcaagaccatgaagatcattgaccctcagcacagcgacaagcccaacgtgctgatcctgggctctgggtggggagctattagctttctgaagcacatcgacaccaagaagtacaacgttagcatcgtgtctcccagaagctacttcatcttcacgcccctgctgcctagcgcaccagtgggaacagtagacgagaagtccatcatcgagcccatcgtgaacttcgccctcaagaaaaaggggaacgtcacctactacgaggccgaggccacctctatcaatcccgacaggaataccgtgaccatcaagagcctgagcgccgtgtcccagctgtaccagcccgagaaccatctgggcctgcatcaagcagagcccgccgaaattaagtacgattatctgatcagcgccgtgggcgccgagcccaacacctttggaatccccggcgtcaccgattacggccatttcctgaaggagattcccaactctttggaaatcagaagaactttcgccgccaacctggaaaaggccaacctgttgcctaagggcgatcccgagagaagaagactgctgagcatcgtggtcgtgggcggagggcccacaggcgtggaagccgctggtgaactgcaggattacgttcaccaggacctgagaaagtttctgcccgcactggccgaggaaatccaaattcacctggtggaagccctgcccatcgtgttgaatatgttcgagaaaaagctgtcatcatacgcgcagtcacatctggaaaacacctcgatcaaagtacacctgagaaccgctgtggccaaagttgaagagaagcagttgctggcaaagaccaaacacgaggacggcaaaattaccgaggaaactattccctacggcaccttgatttgggccaccggcaacaaggccagacccgtgatcaccgacctgttcaagaaaatccctgagcaaaacagcagcaagagaggcttggccgtgaacgactttttgcaagtcaaaggcagcaacaacatcttcgccatcggtgacaacgcctttgccggcttgcctcctacagcccaggtggcccaccaggaagccgagtatctggccaagaatttcgacaagatggcccaaatccccaatttccaaaagaacctatcctccagaaaggataagattgatctcctgttcgaggagaacaactttaaacccttcaagtacaacgatctgggtgccctggcatacctgggctccgaaagggccattgccaccatacgttccggtaagcggaccttctacaccggcggtggcctgatgaccttctacttatggagaattctgtacatgagcatgatcctaagcgcccgctcgagactgaaggtcttcttcgactggatcaaactggcatttttcaaaagggacttttttaaaggattatag

SEQ ID NO: 945 - DNA, 1542 bp, Artificial Sequence
  source: /note="Description of Artificial Sequence: Synthetic polynucleotide"
atgctaagcaagaacctgtacagcaacaagcggctgctgaccagcaccaacaccctcgtgcgcttcgcctccaccagatccaccggggtcgaaaacagcggagctggccccaccagcttcaagaccatgaaggtcatcgacccccagcacagcgacaagccaaacgtgctgatcctgggctctggctggggcgccatcagctttttaaagcacatcgacaccaagaagtacaacgtcagcatcatcagccccagaagctacttcctgttcacccccctgttacccagcgcccctgtgggaaccgtggacgagaagtccatcatcgagcccatcgtgaacttcgccctgaagaaaaagggcaacgtcacctactacgaggccgaggccaccagcatcaaccccgaccggaacaccgtgaccatcaagagcctgagcgccgtgtcccagctgtaccagcctgagaaccacctgggcctgcaccaggccgagcccgccgagattaagtacgactacctgatcagcgctgtgggcgccgagcccaacacctttggaatccccggcgtgaccgactacggccacttcctgaaagagattcccaacagcctggaaatccggcggaccttcgccgccaacctggaaaaggccaacctgctgcctaagggcgaccccgagcggagaaggctgctgagcatcgtggtcgtgggcggaggccccacaggtgtggaagctgctggcgagctgcaggactacgtgcaccaggacctgcggaagttcctgcccgccctggccgaggaagtgcagattcacctggtggaagccctgcccatcgtgctgaacatgtttgagaagaagctgagcagctacgcccagagccacctggaaaacacctccatcaaggtgcacctgagaaccgccgtggccaaggtggaagagaagcagctgctggcaaagaccaagcacgaggacggcaagattaccgaggaaaccatcccctacggcaccctgatttgggccaccggcaacaaggccagacccgtgatcaccgacctgttcaagaagatccccgagcagaacagcagcaagcggggcctggccgtgaacgactttctgcaggtcaaaggcagcaacaacatcttcgccatcggcgacaatgcctttgccggcctgcctcctacagcccaggtggcccaccaagaagccgaatatttggccaagaacttcgacaagatggcccagatccccaatttccagaagaacctgtcctcccggaaggataagatcgacctcctgttcgaggaaaacaacttcaaacccttcaagtacaacgacctgggcgccttagcctacctgggctccgaaagagccattgccaccatcagaagcggcaagcggaccttttacaccggtggtggcctgatgaccttctacctgtggcggatcctgtacttgagcatgatcctgagcgcccgcagcagactgaaggtcttcttcgactggatcaagctggccttcttcaaaagagacttcttcaagggcctgtga

SEQ ID NO: 946 - DNA, 1542 bp, Artificial Sequence
  source: /note="Description of Artificial Sequence: Synthetic polynucleotide"
atgctgagcaagaacctgtacagcaacaagcggctgctgacctcgaccaataccctcgtgcgcttcgccagcaccagatccacaggcgtcgaaaacagcggggctggccctaccagcttcaagaccatgaaggtcatcgacccccagcacagcgacaagcccaacgtgctgatcctgggctctggctggggcgccattagctttctgaagcacatcgacaccaagaagtacaacgtcagcatcatcagccctagaagctacttcctgtttacccccctgttacccagcgcccctgtgggaaccgtggacgaaaagtccattatcgagcccatcgtgaacttcgccctgaagaaaaagggcaacgtcacctactacgaggccgaagccaccagcatcaaccccgaccggaacaccgtgaccatcaaaagcctgagcgccgtgagccagctgtaccagcccgagaaccacctgggcctgcaccaggccgagcccgccgagattaagtacgactacctgatcagcgccgtgggcgccgagcccaacacctttggaatccccggcgtgaccgactacggccacttcctgaaagagatccccaacagcctggaaatccggcggaccttcgccgccaacctagaaaaggccaacctgctgcctaagggcgaccccgagcggagaaggctgctgagcatcgtggtcgtgggcggagggcccacaggcgtagaagccgctggcgagctgcaggactacgtgcaccaggacctgcggaagtttctgcccgccctggccgaggaagtgcagattcacctggtggaagccctgcccatcgtgctgaacatgttcgagaagaagctgagcagctacgcccagagccacctggaaaacacctccatcaaggtgcacctgagaaccgccgtggccaaggtggaagagaagcaactgctggccaagaccaagcacgaggacggcaagattaccgaggaaaccatcccctacggcaccctgatttgggccaccggcaacaaggccagacccgtgatcaccgaccttttcaagaagatccccgagcagaacagcagcaagcggggcctggccgtgaacgacttcctgcaagtcaaaggcagcaacaacatcttcgccatcggcgacaacgcctttgccggcctgcctccaacagcccaggtggcccaccaggaagccgagtacctggccaagaacttcgataagatggcccagatcccaaatttccagaagaacctgtcctcccggaaggataagatcgacctgctgttcgaggaaaacaacttcaagcctttcaagtacaacgatctgggcgccttagcctacctgggcagcgaaagagccattgccaccatcagaagcggcaagcggaccttctacaccggcggtggcctgatgaccttctacctgtggcggatcctgtacttgagcatgatcctgagcgcccgcagcagactgaaggtgttcttcgactggattaagctggccttcttcaagagggacttcttcaagggcctgtga

SEQ ID NO: 947 - DNA, 1542 bp, Artificial Sequence
  source: /note="Description of Artificial Sequence: Synthetic polynucleotide"
atgctgagcaagaacctgtacagcaacaagcggctgctgaccagcaccaacaccctcgtgcgcttcgccagcaccagatccaccggcgtcgaaaacagcggggctggccccaccagcttcaagaccatgaaggtcatcgacccccagcacagcgacaagcccaacgtgctgatcctgggctcgggctggggcgccatcagctttctgaagcacatcgacaccaagaagtacaacgtctccatcatcagccctagaagctacttcctgttcacccccctgctgcccagcgcccctgtgggaaccgtggacgaaaagtccatcatcgagcccatcgtgaatttcgccctgaagaaaaagggcaacgtcacctactacgaggccgaggccaccagcatcaatcccgaccggaacaccgtgaccataaagagcctgagcgccgtgagccagctgtaccagcccgagaaccacctgggcctgcaccaggccgagcccgccgagattaagtacgactacctgatcagcgccgtgggcgccgagcctaacacctttggaatccccggcgtgaccgactacggccacttcctgaaagagatccccaacagcctggaaatccggcggacctttgccgccaacctggaaaaggccaacctgttgcctaagggcgaccccgagcggagaaggctgctgagcatcgtggtcgtgggcggagggcccacaggcgtggaagctgctggcgagctgcaggattacgtgcaccaggacctgcggaagttcctgcccgccctggccgaggaagtccaaattcacctggtggaagccctgcccatcgtgctgaacatgttcgagaagaagctgagcagctacgcccagtcacacctggaaaacacctccatcaaggtgcacctgagaaccgccgtggccaaggtggaagagaagcagctgctggccaagaccaagcacgaagacggcaagattaccgaggaaaccatcccctacggcaccctgatttgggccaccggcaacaaggccagaccggtgatcaccgacctgttcaagaagatccccgagcagaacagcagcaagcggggcctggccgtgaacgacttcctgcaggtcaaaggcagcaacaacatcttcgccatcggcgacaacgcctttgctggcctgcctcctacagcccaggtggcccaccaggaagccgagtacctggccaagaacttcgacaagatggctcagatacccaatttccagaagaacctgtcctcccggaaggataagatcgacctgttgttcgaggaaaacaacttcaagcccttcaagtacaacgatttaggcgccctggcctacctgggaagcgaaagagccattgccaccatcagatccggcaagagaacattctacaccggcggaggcctgatgaccttctacctgtggagaatcctgtacctgagcatgatcctgagcgcccgcagcagactgaaggtgttcttcgactggatcaagctggccttcttcaagagagacttcttcaagggcctgtga

SEQ ID NO: 948 - DNA, 1542 bp, Artificial Sequence
  source: /note="Description of Artificial Sequence: Synthetic polynucleotide"
atgctgagcaagaacctgtatagcaacaagcggctgctcaccagcaccaataccctcgtgcgcttcgccagcaccagatccaccggcgtcgaaaacagcggggctggccccaccagcttcaagaccatgaaggtcatcgacccccagcacagcgacaagcccaacgtgctgatcctgggttctggctggggcgccatcagctttctgaagcacatcgacaccaagaagtacaacgtcagcatcatcagccccagaagctacttcctgttcacccccctgttacccagcgcccctgtgggaaccgtggacgagaagtccatcatcgagcccatcgtgaacttcgccctgaagaaaaagggcaacgtcacctactacgaggccgaggccaccagcatcaatcccgaccggaacaccgtgaccatcaagagcctgagcgccgtgtcccagctgtaccagcccgagaaccacctggggctgcaccaggccgagcccgccgagattaagtacgactacctgatcagcgccgtgggcgcggagcccaacacctttggaatccccggcgtgaccgattacggccacttcctgaaagagatccccaacagcctggaaatccggcggaccttcgccgccaacctggaaaaggccaacctgttgcctaagggcgaccccgagcggagaaggctgctgagcattgtcgtcgtgggcggaggccccacaggcgtggaagctgctggcgagctgcaggactacgtgcaccaggacctgcggaagttcctgcccgccctggccgaggaagtgcagattcacctggtggaagccctgcccatcgtgctgaacatgttcgagaagaagctgagcagctacgcccagagccatctggaaaacacctccatcaaggtgcatctgagaaccgccgtggccaaagtggaagagaagcagctgctggccaagaccaaacacgaagacggcaagataaccgaggaaactatcccctacggcaccctgatttgggccaccggcaacaaggccagaccggtgatcaccgacctgttcaagaagatccccgagcagaacagcagcaagcggggactggccgtgaacgacttcctgcaggtcaaaggcagcaacaacattttcgccatcggcgacaatgcctttgccggcctgccacctacagcccaggtggcccaccaggaagccgagtacctggccaagaatttcgacaagatggcccagatccccaatttccagaagaacctgtcctcccggaaggataagatcgacctgctgttcgaggagaacaacttcaagcccttcaagtacaacgacctgggcgccctggcatacctgggcagcgaaagagccattgccaccatcagaagcggcaagcggaccttctacaccggcggaggcctgatgaccttctacctgtggagaatcctgtacctgtccatgatcctgagcgcccgcagcagactgaaggtgttcttcgactggatcaagctggccttcttcaagagggacttcttcaagggcctgtag

SEQ ID NO: 949 - DNA, 1542 bp, Artificial Sequence
  source: /note="Description of Artificial Sequence: Synthetic polynucleotide"
atgctgtcgaagaacctgtacagtaacaagcggctgctgaccagcaccaacaccctcgtgagattcgccagcaccagatccaccggcgtggaaaacagcggggctggccctacctctttcaagaccatgaaggtcatcgacccccagcacagcgacaagcccaacgtgctgatcctgggctctggctggggagccatcagctttctgaagcacatcgacaccaagaagtacaacgtcagcatcatcagccccagaagctacttcctgttcacccccctgctgcccagcgccccagtggggaccgtggacgagaagtcaatcatcgagcccatcgtgaatttcgccctcaagaaaaagggcaacgtcacctactatgaggccgaggccaccagcatcaatcccgaccggaacaccgttaccatcaagagcctgagcgccgtgtcccagctgtaccagcccgagaaccacctgggcctgcaccaggccgagcccgctgagattaagtacgactacctgatcagcgccgtgggcgccgaacccaacacctttggaatccccggcgtgaccgactacggccacttcctgaaagagatccccaacagcctggaaatccggagaaccttcgccgccaacctggagaaggctaacctgctgcctaagggcgaccccgagcggagaaggctgctgagcatcgtggtcgtgggcggaggccccacaggcgtggaagctgctggcgagctgcaggactacgtgcaccaggacctgagaaagttcctgcccgccctggccgaggaagtgcagattcacttggtggaagccctgcccatcgtgctgaacatgttcgagaagaagctgagcagctacgcccagagccacctggaaaacacctccatcaaggtgcacctgagaacggccgtggccaaagtggaagagaagcagctgctggccaagaccaagcacgaagacggcaaaattaccgaggaaaccatcccctacggcactctgatttgggccaccggcaacaaggccagacccgtgatcaccgacctgttcaagaagatccccgagcagaacagcagcaagcggggcctggccgtgaacgacttcctgcaggtcaaaggcagcaacaacatcttcgccatcggcgacaacgcctttgccggcctgcctcctacagcccaggtggcccaccaggaagccgagtacctggccaagaatttcgacaagatggcccagatccccaatttccagaagaacctgtcctcccggaaggataagatcgacctcctgttcgaggaaaacaacttcaagcccttcaagtacaacgacctgggcgccctggcctacctgggcagcgaaagagccattgccaccatcagaagcggcaagcggaccttctacaccggcggaggcctgatgaccttctacctgtggcggatcctgtacctgagcatgatcctgagcgcccgcagcagactgaaggtgttcttcgactggatcaaactggccttcttcaagagggacttcttcaagggcctgtga

SEQ ID NO: 950 - DNA, 1542 bp, Artificial Sequence
  source: /note="Description of Artificial Sequence: Synthetic polynucleotide"
atgctaagcaagaacctgtacagcaacaagaggctgctgaccagcaccaacaccctcgtgcgcttcgccagcaccagatccaccggcgtcgaaaacagcggggctggtcccaccagcttcaagaccatgaaggtcatcgacccccagcacagcgacaagcccaacgtgctgatcctgggctctggctggggcgccatcagctttctgaagcacatcgacaccaagaagtacaacgtcagcatcatcagccccagaagctacttcctgttcacccccctgttacccagcgcccctgtgggaaccgtggacgaaaagtccatcatcgagcccatcgttaacttcgccctgaagaaaaagggcaacgtcacctactacgaggccgaagccaccagcatcaaccccgaccggaacaccgtgaccatcaagagcctgagcgccgtgtcccagctgtaccaacccgagaaccacctaggcctgcaccaggccgagcccgccgagattaagtacgactacctgatcagcgccgtgggcgccgagcccaacacctttggaatccccggcgtgaccgactacggccacttcctgaaagagatccccaactctctggaaatccggcggaccttcgccgccaatctggaaaaggccaacttactgcctaagggcgatcccgagcggagaaggctgctgagcatcgtggtcgtgggcggaggccccacaggcgtggaagctgctggcgagctgcaggactacgtgcaccaggacctgcggaagtttctgcccgcactggccgaggaagtgcagattcacctggtggaagccctgcccatcgtgctgaacatgttcgagaagaagcttagcagctacgcccagagccacctggaaaacacctccatcaaggtgcacctgagaaccgccgtcgccaaggtggaagagaagcagctgctggcaaagaccaagcacgaggacggcaagattaccgaggaaaccattccctacggtaccctgatttgggccaccggcaacaaggccagacccgtgatcaccgacctgttcaagaagatccctgagcagaactcgagcaagagaggcctggccgtgaatgacttcctgcaggtcaaaggcagcaacaacatcttcgccatcggcgacaacgcctttgccggcctgcctcctacagcccaggtggcccaccaggaagccgagtacctggccaagaacttcgacaagatggcccagatacccaatttccagaagaacctgtcctcccggaaggataagatcgacctgctgttcgaggaaaacaacttcaagcccttcaaatacaacgacctgggcgccctggcctacctgggctccgaaagagccattgccaccatcagaagcggcaagcggaccttctacaccggcggaggcctgatgaccttctacctgtggcggatcttgtacctgagcatgattctgagcgcccgcagcagactgaaggtgttcttcgactggatcaagctggccttcttcaagagggacttcttcaagggactgtga

SEQ ID NO: 951 - DNA, 1542 bp, Artificial Sequence
  source: /note="Description of Artificial Sequence: Synthetic polynucleotide"
atgctgagcaagaacctgtacagcaacaagcggctgctgaccagcaccaacaccctcgtgcgcttcgccagcaccagatccaccggcgtcgaaaacagcggggcaggtcccaccagcttcaagaccatgaaggtcatcgacccccagcacagcgacaagcccaacgtgctgatactgggctctggctggggcgccatctcgtttctgaagcacatcgacaccaagaagtacaacgtcagcatcatctctcccagaagctacttcttattcacccccctgctgcccagcgcacctgtgggaaccgtggacgagaagtccatcatcgagcccatcgtgaacttcgccctgaagaaaaagggcaacgttacctactatgaggccgaggccaccagcatcaaccccgaccggaacaccgttaccatcaagagcctgagcgccgtgtcccagctataccagcccgagaaccacctgggcctgcaccaggccgagcccgccgagattaagtacgactacctgatcagcgctgtgggcgccgagcccaacacctttggaatccccggcgtcaccgactacggccacttcctgaaagagatccccaacagcctggaaatccggagaaccttcgccgccaacctggaaaaggccaacctgctgcctaagggcgaccccgagcggagaaggctgctgagcatcgtggtcgtgggcggaggccccactggcgtggaagctgctggcgagctacaggattacgtgcaccaggacctgcggaagttcctgcccgccctggccgaggaagtgcaaattcacctggtggaagccctgcccatcgtgctgaacatgttcgagaagaagctgagcagctacgcccagagccacctggaaaacacctccatcaaggtgcacctgagaaccgccgtggccaaggtggaagagaagcaactgctggccaagaccaagcacgaggacggcaagattaccgaggaaaccatcccctacggcaccttgatttgggccaccggcaacaaggccagaccggtgatcaccgacctgttcaagaagatccccgagcagaacagcagcaagcggggcctggccgtgaacgacttcttgcaggtcaaaggcagcaacaacatcttcgccatcggcgacaacgcctttgccggcctgcctccaacagcccaggtggcccaccaggaagccgagtacctggccaagaacttcgacaagatggcccagatccccaatttccagaagaacctgtcctcccggaaggataagatcgacctgctgttcgaggaaaacaactttaagcccttcaagtacaacgatctgggcgccttagcctacctgggcagcgaaagagccattgcaaccatcagaagcggcaagcggaccttctacaccggcggaggcctgatgaccttctacctgtggcggatcctgtacctgagcatgatcctaagcgccagaagcagactgaaggtgttcttcgactggatcaagctggccttcttcaagagggacttcttcaagggcctgtag

SEQ ID NO: 952 - DNA, 1542 bp, Artificial Sequence
  source: /note="Description of Artificial Sequence: Synthetic polynucleotide"
atgctgagcaagaacctgtatagcaacaagcggctgctgaccagcaccaacaccctcgtgcgcttcgccagcaccagatccaccggggtcgaaaacagcggggctggccccacctctttcaagaccatgaaggtcatcgacccccagcacagcgacaagcccaacgtgctgatcctgggttctggctggggagccattagctttctgaagcacatcgacaccaagaagtacaacgttagcatcatcagccccagaagctacttcctgttcacccccctgctgccctctgcacctgtgggaaccgtggacgagaagtccatcatcgagcccatcgtgaacttcgccctgaagaaaaagggcaacgtcacctactacgaggccgaggccaccagcatcaaccccgaccggaacaccgtgaccatcaagagcctgtctgccgtgtcccagctgtaccagcccgaaaaccacctgggcctgcaccaggccgagcccgccgagattaagtacgactacctgatcagcgccgtgggcgccgagcccaacacctttggaattcccggcgtgaccgactacggccacttcctgaaagagatccccaacagcctggaaatccggcggaccttcgccgccaacctggaaaaggccaacttactgcctaagggcgaccccgagcggagaaggctgctgtccatcgtggtcgtgggcggaggccccactggcgtggaagctgctggcgaactgcaggactacgtgcaccaggacctgcggaagttcctgcccgccctggccgaggaagtgcagattcacctggtggaagccctgcccatcgtgctgaacatgtttgagaagaagctgagcagctacgcccagagccacctggaaaacacctccatcaaggtgcacctgagaaccgccgtcgccaaggtggaagagaagcagctgttggccaagaccaagcacgaggacggcaagattaccgaggaaaccatcccctacggcaccctgatttgggccaccggtaacaaggccagacccgtgatcaccgacctgttcaagaagattcccgagcaaaacagcagcaagcggggcctggccgtgaacgacttcctgcaagtcaaaggcagcaacaacatcttcgccatcggcgacaacgcctttgccggcctgcctcctacagcccaggtggcccaccaggaagccgagtacctggccaagaacttcgacaagatggcccagatccccaatttccagaagaacctgtcctccagaaaggataagattgacctgctgttcgaggaaaacaacttcaagcccttcaagtacaacgatctgggcgccctggcctacctgggcagcgaaagagccattgccaccatcagatccggtaagcggaccttttacaccggcggaggcctgatgaccttctacctgtggcggatcctgtacctgagcatgatcctgagcgcccgcagcagactgaaggtgtttttcgactggatcaagctggccttcttcaagagggacttcttcaagggcctgtga

SEQ ID NO: 953 - DNA, 1542 bp, Artificial Sequence
  source: /note="Description of Artificial Sequence: Synthetic polynucleotide"
atgctgagcaagaacctgtacagcaacaagcggctgctgacctcgaccaacaccctcgtgcgcttcgccagcaccagatccaccggggtcgaaaactccggggcaggccccaccagcttcaagaccatgaaggtcatcgaccctcagcacagcgacaagccaaacgtgctgatcctgggctctggctggggcgctatcagctttttaaagcacatcgacaccaagaagtacaacgtcagcatcatcagccctagaagctatttcctgttcacccccctgttacccagcgcccctgtggggaccgtggacgagaagtccatcatcgagcccatcgttaacttcgctctgaagaaaaagggcaacgtcacctactacgaggccgaggccaccagcatcaaccccgaccggaacaccgtgaccatcaaaagcctgagcgccgtgtcccagctgtaccagcccgagaaccacctgggcctgcaccaggccgagcccgccgagattaagtacgattacctgatcagcgccgtgggcgccgagcccaacacctttggaatccccggcgtgaccgactacggccacttcctgaaagagatccccaacagcctggaaatccggcggaccttcgccgccaacctggaaaaggccaacctgctgcctaagggcgaccccgagcggagaaggctgctgagcatcgtggtcgtgggcggaggccccacaggcgtggaagctgctggcgagctacaggactacgtgcaccaggacctgcggaagttcctgcccgcactggccgaggaagtgcagattcacctggtggaagccctgcccatcgtgctgaacatgttcgagaagaagctgagcagctacgcccagagccacctggaaaacacctccatcaaggtgcacctgagaaccgccgtcgccaaggtggaagagaagcagctgctggccaagaccaaacacgaggacggcaagattaccgaggaaaccatcccctacggcaccctgatttgggccaccggcaacaaggccagacccgtgatcaccgacctgttcaagaagatccccgagcagaacagcagcaagcggggcctggccgtgaacgacttcctgcaggtcaaaggcagcaacaacatcttcgccatcggcgacaacgcctttgccggcctgcctcctacagcccaggtggcccaccaggaagccgagtacttggccaagaactttgacaagatggcccagatccccaatttccagaagaacctgtcctcccggaaggataagatcgatctgctgttcgaggaaaacaacttcaaacccttcaagtacaacgacttaggcgccctggcctacctgggcagcgaaagagccattgccaccatccgtagcggtaagcggacattctacaccggcggaggcctgatgaccttctacctgtggcggatcctgtacctgagcatgatcctgagcgcccgcagcagactgaaggtgttcttcgactggatcaagctggccttcttcaagagggactttttcaagggcctgtag

SEQ ID NO: 954 - DNA, 1542 bp, Artificial Sequence
  source: /note="Description of Artificial Sequence: Synthetic polynucleotide"
atgctgagcaagaacctgtacagcaacaagcggctgctgaccagcaccaacaccctcgtgcgcttcgccagcaccagatccaccggggtggaaaacagcggggctggccccaccagcttcaagaccatgaaggtcatcgacccccagcacagcgacaagcccaacgtgctgatcctgggctctggctggggcgccatctcgtttctgaagcacatcgacaccaagaagtacaacgtcagcatcatcagccccagaagctacttcttattcacccccctgctgcccagcgcccctgtgggaaccgtggacgagaagtcaatcatcgagcccatcgtgaacttcgccctgaagaaaaagggcaacgtcacctactacgaggccgaggccaccagcatcaatcccgacaggaacaccgtgaccatcaagagcctgagcgccgtgtcccagctataccagcccgagaaccacctgggcctgcaccaggccgagcccgccgagattaagtacgactatctgatcagtgccgtgggcgccgagcccaacacctttggaatccccggcgtgaccgactacggtcacttcctgaaagagatccccaacagcctggaaatccggcggaccttcgccgccaacctggaaaaggccaacctgctgcctaagggtgaccccgagcggagaaggctgctgagcatcgtcgtcgtgggcggaggccccacaggcgtggaagctgctggcgagctgcaggactacgtgcaccaggacctgcggaagttcctgcccgccctggccgaggaagtgcagattcacctggtggaagccctgcccatcgtgctgaacatgttcgagaagaagctgagcagctacgcccagagccacctggaaaacacctcgatcaaggtgcacctgagaaccgccgtggccaaggtggaagagaagcaactgctggccaagaccaagcacgaggacggcaaaattaccgaggaaaccatcccctacggtactttgatttgggccaccggcaacaaggccagacccgtgatcaccgacctgttcaagaagatccccgagcagaacagctccaagcggggcctggcagtgaacgacttcctgcaggtcaaaggcagcaacaacatcttcgccatcggcgacaacgcctttgccggcctgcctcctacagcccaggtggcccaccaggaagccgagtacctggccaagaacttcgacaaaatggcccagatacccaatttccagaagaacctatcctcccggaaggataagatcgacctgctgttcgaggaaaacaacttcaagcccttcaagtacaacgacttaggcgccctggcctacctgggcagcgaaagagccattgccaccataagaagcggcaagcggaccttctacaccggcggaggcttaatgaccttctacctgtggcggatcctgtacctgagcatgattctgagcgcccgcagcagactgaaggtgttcttcgactggatcaagctggccttcttcaagagggactttttcaagggcctgtag

SEQ ID NO: 955 - DNA, 1542 bp, Artificial Sequence
  source: /note="Description of Artificial Sequence: Synthetic polynucleotide"
atgctgagcaagaacctgtacagcaacaagcggctgctgaccagcaccaacaccctcgtgcgcttcgccagcaccagatccacaggcgtcgaaaacagcggggctggccccaccagcttcaagaccatgaaggtcatcgacccccagcacagcgacaaacccaacgtgctgatcctgggctctggctggggcgccatcagctttctgaagcacattgacaccaagaagtacaacgtcagcatcatcagccccagaagctacttcctgttcacccccctgctgcccagcgcccctgtgggaaccgtggacgagaagtccattatcgagcccatcgtgaacttcgctctgaagaaaaagggcaacgtcacctactatgaggccgaggccacctctatcaatcccgaccggaacaccgtgaccatcaagagcctgagcgccgtgtcccagctgtaccaacccgagaaccatctgggcctgcatcaggccgagcccgccgagattaagtacgactatctgatcagcgccgtgggcgccgagcccaacacctttggaatccccggcgtgaccgactacggccacttcctgaaagagatccccaacagcctggaaatcagacggaccttcgccgccaacctggaaaaggccaacctgctgcctaagggcgaccccgagcggagaaggctgctgagcatcgtggtcgtgggcggaggccccacaggcgtggaagctgctggcgaactgcaggactacgtgcaccaggacctgcggaagtttctgcccgccctggccgaggaagtgcagattcacctggtggaagccctgcccatcgtgctgaacatgttcgagaagaagctgagcagctacgcccagagccacctggaaaacacctccatcaaggtgcacctgagaaccgccgtggccaaggtggaagagaagcagttgctggcaaagaccaagcacgaggacggcaagataaccgaggaaaccatcccctacggcactctgatttgggccacgggcaacaaggccagacccgtgatcaccgacctgttcaagaagatccctgagcagaacagcagcaagcggggactggccgtgaacgacttcctgcaggtcaaaggcagcaacaacatcttcgccatcggcgacaacgcctttgctggcctgcctcctacagcccaggtggcccaccaggaagccgagtacctggccaagaacttcgacaagatggctcagatccccaatttccagaagaacctgtcctcccggaaggataagatcgacctgctgttcgaggaaaacaacttcaaacccttcaagtacaacgacctgggcgccctggcctacctgggcagcgaaagagccattgccaccatcagaagcggcaagcggaccttctacaccggcggaggcctgatgaccttctacctgtggcggattatctacctgagcatgattctgtctgcccgcagcagactgaaggtgttcttcgactggatcaagctggccttcttcaaaagggacttcttcaagggactgtga

SEQ ID NO: 956 - DNA, 1542 bp, Artificial Sequence
  source: /note="Description of Artificial Sequence: Synthetic polynucleotide"
atgctgagcaagaacctgtacagcaacaagcggctgctgaccagcaccaacacgctcgtgcgcttcgccagcaccagatccaccggcgtcgaaaacagcggggctggccccaccagcttcaagaccatgaaggtcatcgacccccagcacagcgacaagcccaacgtgctgatactgggctcgggctggggagctatcagctttctgaagcacatcgacaccaagaagtacaacgtcagcatcatctctcccagaagctacttcctgttcacccccctgctgcccagcgcccctgtgggaaccgtggacgagaagtccatcatcgagcccatcgtgaactttgccctgaagaaaaagggcaacgtcacctactatgaggccgaggccaccagcatcaaccccgaccggaacaccgtgaccatcaagagcctgagcgccgtgtcccagctgtaccagcccgagaaccacctgggcctgcatcaggccgagcccgccgagattaagtacgactacctgatcagcgctgtgggcgcggagcccaacacctttggaatccccggcgtgaccgactacggccacttcctgaaagagatccccaacagcctggaaatccggagaaccttcgccgccaacctggaaaaggccaacctgctgcctaagggcgaccccgagagaagaaggctgctgagcatcgtggtcgtgggcggaggccccacaggcgtggaagctgctggcgagctgcaggactacgtgcaccaggacctgcggaagttcctgcccgccctggccgaggaagtgcaaattcacttggtggaagccctgcccatcgtgctgaacatgttcgagaagaagctgagcagctacgcccagagccatctggaaaacacctccatcaaggtgcacctgagaaccgccgtggccaaggtggaagagaagcagctgctggccaagacgaagcacgaggacggcaagattaccgaggaaaccatcccctacggcaccctgatttgggccaccggtaacaaggccagacccgtgatcaccgacctgttcaagaagatccccgagcagaacagcagcaagcggggcctggccgtgaacgacttcctgcaagtcaaaggcagcaacaacattttcgccatcggcgacaacgcctttgccggcctgcctcctacagcccaggtggcccaccaggaagccgagtacttggccaagaacttcgacaagatggcccaaatccccaatttccagaagaacctgtcctcccggaaggataagatcgacctcctgttcgaggaaaacaacttcaagcccttcaagtacaacgacctgggcgccctggcatacctgggcagcgaaagagccattgccaccatcagaagcggcaagcggacattttacaccggcggtggcctgatgaccttctacctgtggcggatcctgtacatgagcatgatcctgtctgcccgcagcagactgaaggtgttcttcgactggatcaagctggccttcttcaagagggacttctttaagggactgtga

SEQ ID NO: 957 - DNA, 1542 bp, Artificial Sequence
  source: /note="Description of Artificial Sequence: Synthetic polynucleotide"
atgctgagcaagaacttgtacagcaacaagcggttgctgaccagcaccaacaccctcgtgcgcttcgccagcaccagatccaccggcgtcgaaaacagcggggctggccccacaagctttaagaccatgaaagtcatcgaccctcagcacagcgacaagcccaacgtgctgatcctgggctctggctggggcgccattagctttctgaagcacatcgacaccaagaagtacaacgtcagcatcatcagccccagaagctacttcctgttcacccccctgttacccagcgcccctgttggaaccgtagacgaaaagtccatcatcgagcccatcgtgaacttcgccctcaagaaaaagggcaacgtcacctactacgaggccgaggccaccagcatcaaccccgaccggaacaccgtgaccatcaagtcactgagcgccgtgtcccagctgtaccagcccgagaaccacctgggcctgcaccaagccgagcccgccgagattaagtacgactacctgatcagcgccgtgggcgccgaacctaacacctttggaatccccggcgtgactgactacggccacttcctgaaagagatccccaacagcctggaaatccggcggaccttcgccgccaacctggaaaaggccaacctgctgcctaagggcgaccccgagcggagaaggctgctgagcatcgtggtcgtgggcggaggccccacaggcgtggaagctgctggcgagctgcaggactacgtgcaccaggacctgcggaagttcctgcctgccctggccgaagaaatccagattcacctggtggaagctctgcccatcgtgctgaacatgttcgagaagaagctgagcagctacgcccaaagccacctggaaaacacctccatcaaggtgcacctgagaaccgccgtcgccaaggtggaagagaagcagctgctggccaagaccaagcacgaggacggcaagattaccgaagaaaccatcccctacggcaccctgatttgggccaccggcaacaaggccagacccgtgatcaccgacctgttcaagaagatccccgagcagaacagcagcaagcggggcctggccgtgaacgacttcctgcaggtcaaaggcagcaacaacatcttcgccatcggcgacaacgcctttgctggcctgcctcctacagcccaggtggcgcaccaggaagccgaatacctggccaagaacttcgacaagatggcccagatccccaatttccagaagaacctgtcctcccggaaggataagatcgacctgttgttcgaggaaaacaacttcaagcccttcaagtacaacgacctgggcgccctggcctacctgggcagcgaaagagccattgccaccatcagatccggcaagagaaccttctacaccggcggaggcctgatgaccttctacctgtggcggatcttgtacctgagcatgatcctgagcgcccgcagcagactgaaggtgttcttcgactggatcaagctggccttcttcaagagggacttcttcaagggcctgtga

SEQ ID NO: 958 - DNA, 1542 bp, Artificial Sequence
  source: /note="Description of Artificial Sequence: Synthetic polynucleotide"
atgctgagcaagaacctgtacagcaacaagcggctgctgaccagcaccaacaccctcgtgcgcttcgccagcaccagatccaccggcgtcgaaaacagcggggctggccccacctctttcaagaccatgaaggtcatcgacccccagcacagcgacaagcccaacgtgctgatcctgggttctggctggggcgccatcagctttctgaagcacattgacaccaagaagtacaacgtcagcatcatcagccccagaagctacttcctgtttacgcccctgctgcccagcgcccctgtgggaaccgtggacgagaagtccatcattgagcccatcgttaacttcgccctgaagaaaaagggcaacgtcacctactacgaggccgaggccaccagcatcaaccccgaccggaacaccgtgaccatcaagagcctgagcgccgtgtcccagctgtaccagcccgagaaccacctgggcctgcatcaggccgaacccgccgagattaagtacgactacctgatcagtgccgtaggcgccgagcccaacacctttggaatccccggcgtgaccgactacggccacttcctgaaagagatccccaacagcctggaaatccggcggaccttcgccgccaacctggaaaaggccaacctgctgcctaagggcgaccccgagcggagaaggctgctgagcatcgtggtcgtgggcggaggccccacaggcgtggaagctgctggcgagctgcaggactacgtgcaccaggacctgcggaagttcctgcccgccttggccgaggaagtgcagattcacctggtggaagccctgcccatcgtgctgaatatgttcgagaagaagctgagcagctacgcccagagccacctggaaaacacttcgatcaaggtgcacctgagaaccgccgtggccaaggtggaagagaagcagctgctggccaagaccaagcacgaggacggcaagataaccgaggaaactatcccatacggcaccctgatttgggccaccggcaacaaggccagacccgtgatcaccgacctgttcaagaagatccctgagcagaactcgagcaagcggggcctggcagtgaacgacttcctgcaggtcaaaggcagcaacaacatcttcgccatcggcgacaacgcctttgccggcctgcctcctacagcccaagtggcccaccaggaagccgaatacctggccaagaacttcgacaagatggcccagatcccaaatttccagaagaatctgtcctcccggaaggataagatcgacctgctgttcgaggaaaacaacttcaagcctttcaagtacaacgacctgggcgccctggcctacctgggcagcgaaagagccattgccaccatcagaagcggcaagcggaccttctacaccggcggaggcttaatgaccttctacctgtggcggatcatctacctgtccatgatcctgagcgcccgcagcagactgaaggtgttcttcgactggatcaagctggcattcttcaagagggacttctttaagggcctgtga

SEQ ID NO: 959 - DNA, 1542 bp, Artificial Sequence
  source: /note="Description of Artificial Sequence: Synthetic polynucleotide"
atgctatcgaagaacctgtacagcaacaagcggctgctgaccagcaccaacaccctcgtgcgcttcgccagcaccagatccaccggcgtcgaaaacagcggggctggccctaccagcttcaagaccatgaaagtcatcgaccctcagcacagcgacaagcccaacgtgctgatcctgggctctggctggggcgccatcagctttctgaagcacatcgacaccaagaagtacaacgtcagcatcatcagccccagaagctacttcctgttcacccccttgctgccctctgcacctgtgggaaccgtggacgagaagtccatcatcgagcccatcgtgaacttcgccctgaagaaaaagggcaacgtcacctactatgaggccgaggccaccagcatcaaccccgaccggaacaccgtgaccatcaagagcctgagcgccgtgtcccagctataccagcccgagaaccacctgggcctgcatcaggccgagcccgccgagattaagtacgactacctgatcagcgccgtgggcgccgagcccaacacctttggaatccccggcgtgactgactacggccacttcctgaaagagatccccaacagcctggaaatccggcggaccttcgccgccaacctggaaaaggccaacctgctgcctaagggcgaccccgagcggagaaggctgctgagcatcgtcgtcgtgggcggaggccccacaggtgtggaagctgctggcgagctacaggattacgtgcaccaggacctgcggaagttcctgcccgccctggccgaggaagtgcagattcacctggtggaagccctgcccatcgttctgaacatgttcgagaagaagctgagcagctacgcccagtcacatctggaaaacacctccatcaaggtgcacctgagaaccgccgtggccaaggtggaagagaagcagctgctggccaagaccaagcacgaggacggcaagattaccgaggaaaccatcccctacggcaccctgatttgggccaccggcaacaaggccagacccgtgatcaccgacctgttcaagaagatccccgagcagaacagcagcaagcggggcctggccgtgaatgactttctgcaggtcaaaggcagcaacaacattttcgccatcggtgacaacgcctttgccggcctgccacctaccgcccaggtggcccaccaggaagccgagtacctggccaagaatttcgacaagatggcccagatccccaatttccagaagaacctgtcctcccggaaggataagatcgacctgctgttcgaggaaaacaacttcaagcccttcaagtacaacgacctgggcgccctggcctacctgggcagcgaaagagccattgcaaccatcagaagcggcaagcggaccttctacaccggcggaggcctgatgaccttctacctgtggcggatcatctacctgagcatgatcctgagcgcccgcagcagactgaaggtgttcttcgactggatcaagttagccttcttcaagagggacttctttaagggactgtga

SEQ ID NO: 960 - DNA, 1542 bp, Artificial Sequence
  source: /note="Description of Artificial Sequence: Synthetic polynucleotide"
atgctgagcaagaacctgtacagcaacaagcggctgctgaccagcacgaacacgctagtgagattcgccagcaccagatccaccggcgtcgaaaacagcggggctggtcccaccagcttcaagaccatgaaggtcatcgaccctcagcacagcgacaagcccaacgtgctgatcctgggctctggctggggcgccattagctttctgaagcacatcgacaccaagaagtacaacgtcagcatcatcagccccagaagctacttcctgttcacccccctgctgccctctgcacctgtggggaccgtagacgagaagtccatcatcgagcccatcgtgaacttcgccctgaagaaaaagggcaacgtcacctactacgaggcagaggccaccagcatcaaccccgacaggaacaccgtgaccatcaagagcctgagcgccgtttcccagctgtaccagcccgagaaccacctgggcctgcaccaggccgagcccgccgaaattaagtacgactacctgatcagcgccgtgggcgccgagcccaacacctttggaatccccggcgtgaccgactacggccacttcctgaaggagattcccaacagcctggaaatccggcggaccttcgccgccaacctggaaaaggctaacctgctgcctaagggcgatcccgagcggagaaggctgctgagcatcgtggtcgtgggcggaggccccacaggcgtggaagctgctggcgagctgcaggactacgtgcaccaggacctgcggaagttcctgcctgccctggccgaagaagtgcagattcacctggtggaagctctgcccatcgtgctgaacatgttcgagaagaagctgagcagctacgcgcagagccacctggaaaacacctccatcaaggtgcacctgagaaccgccgtggccaaggtggaagagaagcagctgctggccaagaccaagcacgaggacggcaagattaccgaggaaaccatcccctacggcactctgatttgggccaccggcaacaaggccagacccgtgatcaccgacctgttcaagaagatccccgagcagaacagctccaagcggggcctggccgtgaacgacttcctgcaggtcaaaggcagcaacaacatcttcgccatcggcgacaacgcctttgccgggctgcctcctacagcccaggtggcccaccaggaagccgagtacctggccaagaacttcgataagatggcccagatccccaatttccagaagaacctgtcctccagaaaggataagatcgacctgctgttcgaggaaaacaacttcaagcccttcaagtacaacgacctgggcgccctggcctacctgggcagcgaaagagccattgccaccatcagaagcggcaagcggaccttctacaccggcggaggcctgatgaccttctacctgtggcggatcatctacctgagcatgatcctgagcgcacgcagcagactgaaggtgttcttcgactggatcaagctggcctttttcaagagggacttcttcaagggcctgtga

SEQ ID NO: 961 - DNA, 1542 bp, Artificial Sequence
  source: /note="Description of Artificial Sequence: Synthetic polynucleotide"
atgctgagcaagaatctgtacagcaacaagcggctgctgaccagcaccaataccctcgtgcgcttcgcctccaccagatccaccggcgtcgaaaacagcggggctggccccaccagcttcaagaccatgaaggtcatcgacccccagcacagcgacaaacccaacgtgctgatcctgggctctgggtggggcgccatcagctttttaaagcacatcgacaccaagaagtacaacgtcagcatcatcagccctagaagctacttcatcttcacccccctgctgccttctgcccctgtgggaaccgtggacgagaagtccatcatcgagcccatcgtgaacttcgccctgaagaaaaagggcaacgtcacctactacgaggccgaggccaccagcatcaaccccgaccggaacaccgtgaccatcaagagcctgagcgccgtgtcccagctgtaccagcccgagaaccatctgggcctgcatcaggccgagcctgccgagattaagtacgactacttaatcagcgccgtaggcgccgagcccaacacctttggaatccccggcgtcaccgactacggccacttcctgaaagagattcccaacagcctggaaataagacggaccttcgccgccaacctggaaaaggccaacctgctgcctaagggtgaccccgagcggagaaggctgctgagcatcgtggtcgtgggcggaggccccacaggcgtggaagctgctggcgagctgcaggactacgttcaccaggacctgcggaagttcctgcccgccctggccgaggaagtgcagattcacctggtggaagccctgcccatcgtgctgaacatgttcgagaagaagctgagcagctacgcccagagccacctggaaaacacctccatcaaggtgcacctgagaaccgccgtggccaaggtggaagagaagcagctgctggccaagaccaagcacgaggacggcaagattaccgaggaaaccatcccctacggcaccctgatttgggccaccggcaacaaggccagacccgtaatcaccgacctgttcaagaagatccccgagcagaacagcagcaagcggggattggccgtgaacgacttcctgcaggtcaaaggcagcaacaacattttcgccatcggcgacaacgcctttgccggcctgccacctacagcccaggtggcccaccaggaagccgagtacttggccaagaacttcgacaagatggcccagatccccaatttccagaagaatctgtcctcccggaaggataagatcgacctgctgttcgaggaaaacaacttcaagcccttcaagtacaacgacctgggcgccctggcctacctgggcagcgaaagagccattgccaccatcagaagcggcaagcggaccttctacaccggcggtggcctgatgaccttctacctgtggcggatcctgtacctgagcatgatcctgagcgcccgctcgagactgaaggtcttcttcgactggatcaagctggccttcttcaagagggacttcttcaagggcctgtga

SEQ ID NO: 962 - DNA, 1542 bp, Artificial Sequence
  source: /note="Description of Artificial Sequence: Synthetic polynucleotide"
atgctgagcaagaacctgtacagcaacaagcggttgctcaccagcaccaacaccctcgtgagattcgccagcaccagatccaccggcgtcgaaaacagcggggctggccccaccagcttcaagaccatgaagatcatcgacccccagcacagcgacaagcccaacgtgctgatcctgggctctggctggggcgccatcagctttctgaagcacatcgacaccaagaagtacaacgtcagcatcatcagccccagaagctacttcctgtttacccccctgctgccctctgcacctgtgggaaccgtggacgagaagtccatcatcgagcccatcgttaacttcgccctgaagaaaaagggcaacgtcacctactatgaggccgaggccaccagcatcaaccccgaccggaataccgtgaccatcaagagcctgagcgccgtgagccagctgtaccagcccgagaaccatctgggcctgcaccaggccgagcccgccgagattaagtacgactacctgatcagcgccgtgggcgccgagcccaacacctttggaatccccggcgtgactgactacggccacttcctgaaagagatccccaacagcttggaaatccggcggaccttcgccgccaacctggagaaggccaacctgctgcctaagggcgaccccgagcggagaaggctgctgagcattgtggtcgtgggcggaggccccacaggcgtggaagctgctggtgagctgcaggactacgtgcaccaggacctgcggaagtttctgcctgccctggccgaggaagtgcaaattcacctggtggaagccctgcccatcgtgctgaacatgttcgagaagaagctgagcagctacgcccagagccacctggaaaacacctccatcaaggtgcacctgagaaccgccgtggccaaggtggaagagaagcagctgctggccaagaccaagcacgaggacggcaagattaccgaggaaaccatcccctacggcaccctgatttgggccacgggcaacaaggccagacccgtgatcaccgacctgttcaagaagatccccgagcagaacagcagcaagagaggcctggccgtgaacgacttcctgcaggtcaaaggcagcaacaacatcttcgccatcggcgacaacgcatttgctggcctgcctcctacagcccaggtggcccaccaagaagccgagtatttggccaagaacttcgacaagatggcccagatccccaatttccagaagaacctgtcctcccggaaggataagatcgacctgctgttcgaggaaaacaactttaagcccttcaagtacaacgacctgggtgccctggcctacctgggcagcgaaagagccattgccaccatcagaagcggcaagcggaccttctacaccggcggaggcttaatgaccttctacctgtggcggatcctgtacctgagcatgatcctgagcgcacgcagcagactgaaggtgttcttcgactggatcaagctggccttcttcaagagggacttcttcaagggcctgtga

SEQ ID NO: 963 - DNA, 1542 bp, Artificial Sequence
  source: /note="Description of Artificial Sequence: Synthetic polynucleotide"
atgctgagcaagaacctgtacagcaacaagcggctgctgaccagcaccaacaccctcgtgcgcttcgccagcaccagatccaccggcgtcgaaaacagcggggcaggccccacaagcttcaagaccatgaaggtcatcgacccccagcacagcgacaagcccaacgtgctgatcctgggctctggctggggcgccatctcgtttctgaagcacatcgacaccaagaagtacaacgtcagcatcatcagccccagaagctacttcctgttcacccccctgctgcccagcgcccctgtgggaaccgtggacgagaagtccatcatcgagcccatcgtgaacttcgccctgaagaaaaagggcaacgttacctactacgaggcagaggccaccagcatcaaccccgaccggaacaccgtgaccatcaagtcattaagcgccgtgtcccagctgtaccagcccgaaaaccacctgggcctgcaccaggccgagcccgccgagattaagtacgactacctgatcagcgccgtaggcgccgagcctaacacctttggaatccccggcgtgaccgactacggccacttcctgaaagagatccccaacagcctggaaatccggcggacctttgccgccaacctggaaaaggccaacctgctgcctaagggcgaccccgagagaagaaggctgctgagcatcgtcgtcgtgggcggaggccctacaggcgtggaagctgctggcgagctgcaggactacgtgcaccaggacctgcggaagtttctccccgccctggccgaggaaatccagattcacttggtggaagccctgcccatcgttctgaacatgttcgagaagaagctgagcagctacgcccagagccacctggaaaacacctccatcaaggtgcacctgagaaccgccgtggccaaagtggaagagaagcagctgctggccaagaccaagcacgaagacggcaagattaccgaggaaaccatcccctacggcaccctgatttgggccaccggcaacaaggccagacccgtgatcaccgacctgttcaagaagatccccgagcagaacagcagcaagcggggcctggccgtgaatgacttcctgcaggtcaaaggcagcaacaacatcttcgccatcggcgacaacgcctttgccggcctgcctcctacagcccaggtggcccaccaggaagccgagtacctggccaagaacttcgacaagatggcccagatcccaaatttccagaagaatctgtcctcccggaaggataagattgacctgctgttcgaggaaaacaacttcaagcccttcaagtacaacgacctgggcgccctggcctacctgggcagcgaaagagccattgccaccataagaagcggcaagagaaccttctacaccggcggaggcttaatgaccttctacctgtggcggatcctgtacctgagcatgatcctgagcgcccgcagcagactgaaggtcttcttcgactggatcaagctggccttcttcaagagggacttcttcaagggactgtag

SEQ ID NO: 964 - DNA, 1542 bp, Artificial Sequence
  source: /note="Description of Artificial Sequence: Synthetic polynucleotide"
atgctgagcaagaacctgtacagcaacaagcggctgctgaccagcaccaacaccctcgtccgcttcgccagcaccagatccaccggcgtcgaaaactccggggctggccccaccagcttcaagaccatgaaggtcatcgacccccagcacagcgacaagcccaacgtgctgatcctgggctctgggtggggagccatcagctttctgaagcacatcgacaccaagaagtacaacgtcagcatcatcagccccagaagctacttcatcttcacccccctgctgcccagcgcccctgtgggaacagtagacgagaagtccatcatcgagcccatcgtgaacttcgccctgaagaaaaagggcaacgtcacctactatgaggccgaggccaccagcatcaaccccgaccggaacaccgtgaccatcaagagcctgagcgccgtgtcccagctataccagcccgagaaccacctgggcctgcaccaggccgagcccgccgagattaagtacgactacctgatcagcgccgtaggcgccgagcccaacacctttggaatccccggcgtgaccgactacggccacttcctgaaagagatccccaacagcctggaaatccggcggaccttcgccgccaacctggaaaaggccaacctgctgcctaagggcgatcccgagcggagaaggctgctgagcatcgtggtcgtgggcggtggccccacaggcgtggaagccgctggcgaactgcaggactacgtgcaccaggacctgcggaagttcctgcccgccctggccgaggaagtccagattcacctggtggaagccctgcccatcgtgctgaacatgttcgagaagaagctgagcagctacgcccaaagccacctggaaaacacctcgatcaaagtgcacctgagaaccgccgtggccaaggtggaagagaagcagctgctggccaagaccaagcacgaggacggcaagattaccgaggaaaccatcccctacggcaccctgatttgggccaccggtaacaaggccagacccgtgatcaccgacctgttcaagaagatccccgagcagaacagcagcaagcggggcctggccgtgaacgactttttgcaagtgaaaggcagcaacaacatcttcgccatcggcgacaacgcctttgccgggttgcctcctacagcccaggtggcccaccaggaagccgagtacctggccaagaactttgacaagatggcccagatccccaatttccagaagaacctgtcctcccggaaggataagatcgacctgctgttcgaggagaacaacttcaagcccttcaagtacaacgacctgggcgccctggcctacctgggcagcgaaagagccattgccaccataagaagcggcaagcggaccttctacaccggcggaggcctgatgaccttctacctgtggcggatcctgtacctgagcatgatcctgagcgcccgcagcagactgaaggtcttcttcgactggatcaagctggccttcttcaagagagacttcttcaagggactgtga

SEQ ID NO: 965 - DNA, 1542 bp, Artificial Sequence
  source: /note="Description of Artificial Sequence: Synthetic polynucleotide"
atgctgagcaagaacctgtacagcaacaagcggctgctgacctcgaccaacaccctcgtgcgcttcgccagcaccagatccaccggcgtcgaaaacagcggggctggccccaccagctttaagaccatgaagatcatcgacccccagcacagcgacaagcccaacgtgctgatcctgggctctggctggggcgccatcagctttctgaagcacatcgacaccaagaagtacaacgttagcatcatcagccccagaagctacttcctgttcacccccctgctgcccagcgccccagttgggaccgtggacgagaagtccatcatcgagcccatcgtgaacttcgccctgaagaaaaagggcaacgtcacctactacgaggccgaggccaccagcatcaaccccgaccggaacaccgtgaccatcaagagcctgagcgccgtgtcccagctgtaccagcccgagaaccacctgggcctgcaccaggccgagcccgccgagattaagtacgactacctgatcagcgccgtgggtgccgagcccaacacctttggaattcccggcgtgaccgactacggccacttcctgaaagagatccccaacagcctggaaatccggcggaccttcgccgccaacctggaaaaggccaacttactgcctaagggcgaccccgagcggagaaggctgctgagcatcgtggtcgttggcggtgggcccacaggtgtggaagctgctggcgagctgcaggactacgtgcaccaggacctgcggaagttcctgcctgccctggccgaggaagtgcagattcacctggtcgaagccctgcccatcgtgctgaacatgttcgagaagaagctgtcatcatacgcccagagccacctggaaaacacctccatcaaggtgcatctgagaaccgctgtggccaaggtggaagagaagcagctgctggccaagaccaaacacgaggacggcaaaattaccgaggaaactatcccctacggcaccctgatttgggccaccggcaacaaggccagacccgtgatcaccgacctgttcaagaagatccccgagcagaacagcagcaagcggggcttggccgtgaacgacttcctgcaggtcaaaggcagcaacaacatcttcgccatcggcgacaacgcctttgccggcctgcctcctacagcccaggtggcccaccaggaggccgaatacctggccaagaacttcgacaaaatggcccaaatccccaatttccaaaagaacctgtcctcccggaaggataagatcgacctgctgttcgaggagaacaacttcaagcccttcaagtacaacgacctgggcgccctggcctacctgggcagcgaaagagccattgccaccatcagaagcggcaagcggaccttctacaccggcggaggcctgatgaccttctacctgtggcggatcatctacctgagcatgatcctgagcgcccgcagcagactgaaggtgttcttcgactggatcaagttagccttcttcaagagggacttcttcaagggcctgtga

SEQ ID NO: 966 - DNA, 1542 bp, Artificial Sequence
  source: /note="Description of Artificial Sequence: Synthetic polynucleotide"
atgctgagcaagaacctgtacagcaacaagcggctgctgaccagcaccaataccctcgtgcgcttcgccagcaccagatccacaggcgtggaaaacagcggggcaggccccaccagcttcaagaccatgaagatcatcgacccccagcacagcgacaagcccaacgtgctgatcctgggctctggctggggcgccatctcgtttctgaagcacatcgacaccaagaagtacaacgtcagcatcgtgagccccagaagctacttcctgttcacccccctgctgcccagcgcccctgtgggaaccgtggacgagaagtccatcatcgagcccatcgtgaacttcgccctgaagaaaaagggcaacgtcacctactacgaggccgaagccaccagcatcaaccccgaccggaacaccgtgaccatcaagagcctgagcgccgtgtcccagctgtaccagcccgagaaccacctgggcctgcaccaggccgagcccgccgagattaagtacgactatctgatcagcgccgtgggcgccgagcccaacacctttggaatccccggcgtgaccgactacggccacttcctgaaagagatccccaacagcctggaaatccggcggaccttcgccgccaacctggaaaaggccaacctgctgcctaagggcgaccccgagcggagaaggctgctgagcatcgtcgtcgtgggtggagggcccactggcgtggaagctgctggcgagctgcaggactacgtgcaccaggacctgcggaagtttctgcccgccctggccgaggaagtgcagattcacctggtggaagccctgcccatcgtgctgaacatgttcgagaagaagctgagcagctacgcccaaagccacctggaaaacacctccatcaaggtgcatctgagaaccgccgtggccaaggttgaagagaagcagttgctggccaagaccaagcacgaggacggcaagataaccgaggaaaccattccctacggcaccctgatttgggccaccggcaacaaggcaagacccgtgatcaccgacctgttcaagaaaatccccgagcagaacagcagcaagcggggcctggcagtgaacgacttcctgcaggtcaaaggcagcaacaacatcttcgccattggcgacaatgcatttgccggcctgcctcctacagcccaggtggcccaccaggaagccgaatacctggccaagaacttcgacaaaatggcccagatccccaatttccagaagaacctgtcctcccggaaggataagatcgacctgctgttcgaggaaaacaacttcaagcccttcaagtacaacgacttaggcgccctggcctacctgggaagcgaaagagccattgccaccatcagaagcggcaagcggaccttctacaccggtggaggcctgatgaccttctacctgtggcggatcctgtacctgagcatgatcctgagcgcccgcagcagactgaaggtgttcttcgactggatcaagctggcattcttcaagagggacttcttcaagggcctgtga

SEQ ID NO: 967 - DNA, 1542 bp, Artificial Sequence
  source: /note="Description of Artificial Sequence: Synthetic polynucleotide"
atgctgagcaagaacctgtacagcaacaagcggctgctgaccagcaccaacaccctcgtgcgcttcgccagcaccagatccaccggcgtcgaaaacagcggggctggccctaccagcttcaagaccatgaagatcatcgacccccagcacagcgacaagcccaacgtgctgatcctgggttctggctggggcgctatcagctttctgaagcacatcgacaccaagaagtacaacgtcagcatcatcagccccagaagctacttcttatacacccccctgctgccctctgcccctgtgggaaccgtggacgagaagtccatcatcgagcccatcgtgaacttcgctctgaagaaaaagggcaacgtcacctactatgaggcagaagccaccagcatcaaccccgaccggaacaccgtgaccatcaagagcctgagcgccgtgtcccagctgtaccagcccgaaaaccacctgggcctgcaccaggccgagcccgccgagattaagtacgactacctgatcagcgccgtgggcgccgagcccaacacatttggaatccccggcgtcaccgactacggccacttcctgaaagagatccccaactctctggaaatccggcggaccttcgccgccaacctggaaaaggccaacctgctgcctaagggcgatcccgagcggagaaggctgctgagcattgtggtcgtgggcggaggccccacaggcgtggaagctgctggcgagctgcaggactatgtgcaccaggacctgcggaagtttctccccgccttggccgaggaagtgcagattcacctggtggaagctctgcccatcgtgctgaacatgttcgagaagaagctgagcagctacgcccagagccacctggaaaacacctccatcaaggtgcacctgagaaccgccgtggccaaggtggaagagaagcagctgctggccaagaccaagcacgaggacggcaagattaccgaggaaaccatcccctacggtaccctgatttgggccaccggcaacaaggccagacccgtgatcaccgacctgttcaagaagatccccgagcagaacagcagcaagagaggcctggccgtgaacgacttcctgcaggtcaaaggcagcaacaacatcttcgccatcggcgacaacgcctttgccggcctgcctccaacagcccaggtggcccaccaagaagccgagtacctggccaagaacttcgacaaaatggcccagatccccaatttccagaagaacctgtcctcccggaaggataagatcgacctgctgttcgaggaaaacaacttcaagcctttcaagtacaacgacctgggcgccctggcctacctgggcagcgaaagagccattgccaccatcagatccggcaagcggaccttctacaccggcggaggcctgatgaccttctacctgtggcggattctgtacctgagcatgatcctgagcgcccgcagcagactgaaggtgttcttcgactggatcaagctggccttcttcaagagggacttcttcaagggattatga

SEQ ID NO: 968 - DNA, 1542 bp, Artificial Sequence
  source: /note="Description of Artificial Sequence: Synthetic polynucleotide"
atgctgagcaagaacctgtacagcaacaagcggctgctgaccagcaccaacaccctagtgcgcttcgccagcaccagatccaccggcgtcgaaaacagcggggctggccccaccagcttcaagaccatgaagatcatcgacccccagcacagcgacaagccaaacgtgctgatcctgggctctggctggggcgccatcagctttctgaagcacatcgacaccaagaagtacaacgtcagcatcgtgtctcccagaagctacttcctgttcacccccctgctgcccagcgcccctgtgggaaccgtggacgagaagtccatcatcgagcccatcgtgaacttcgccctgaagaaaaagggcaacgtcacctactacgaggccgaggccacctctatcaaccccgaccggaacaccgtgaccatcaagagcctgagcgccgtgtcccagctgtaccagcccgaaaaccacctgggcctgcatcaagccgagcctgccgagattaagtacgactacctgatcagcgccgtgggtgccgagcccaacacctttggaatccccggcgtgaccgactacggccacttcctgaaagaaatccccaactctctggaaatccggcggaccttcgccgccaacctggaaaaggctaacctgttgcctaagggcgaccccgagcggagaaggctgctgagcatcgtggtggtgggcggaggccccacaggcgtggaggctgctggcgagctgcaggactacgtgcaccaggacctgcggaagttcctgcccgccctggccgaggaagtgcagattcacctggtggaagctctgcccatcgtgctgaacatgttcgagaagaagctgagctcatacgcccagagccacctggaaaacacctccatcaaggtgcacctgagaaccgccgtcgccaaggtggaagagaagcagctgctggccaagaccaagcacgaggacggcaagattaccgaggaaaccatcccctacggcaccctgatttgggccacgggtaacaaggccagacccgtgatcaccgacctgttcaagaagatccccgagcaaaacagcagcaagcggggcctggccgtgaatgacttcttgcaggtcaaaggcagcaacaacatcttcgccatcggcgacaacgcctttgctggcctgcctcctacagcccaggtggcccaccaggaagccgagtacctggccaagaacttcgacaagatggcccagatccccaatttccagaagaacctgtcctcacggaaggataagatcgacctgctgttcgaggaaaacaacttcaagcccttcaagtacaacgatctgggcgccctggcctacctgggcagcgaaagggccattgccaccatcagaagcggcaagcggaccttctacaccggtggaggcctgatgaccttctacctgtggcggatcctgtacttgagcatgatcctgagcgcccgcagcagactgaaggtgttcttcgactggatcaagctggccttcttcaagagggacttcttcaagggcctgtag

SEQ ID NO: 969 - DNA, 1542 bp, Artificial Sequence
  source: /note="Description of Artificial Sequence: Synthetic polynucleotide"
atgctgagcaagaatctgtacagcaacaagcggctgctgaccagcaccaacaccctcgtgcgcttcgccagcaccagatccaccggcgtcgaaaacagcggggctggccccacaagcttcaagaccatgaaagtcatcgacccccagcacagcgacaagcccaacgtgctgatcctgggctctggctggggcgccatcagctttctgaagcacatcgacaccaagaagtacaacgtcagcatcatcagccccagaagctacttcatcttcacccccttgttacccagcgcccctgtgggaaccgtggacgagaagtccattatcgagcccatcgtgaacttcgccctcaagaaaaagggcaacgtcacctactacgaggccgaggccaccagcatcaaccccgaccggaacaccgtgaccatcaagagcctgagcgccgtgtcccagctgtaccagcccgagaaccacctgggcctgcaccaggccgagcccgccgaaattaagtacgactacctgatcagcgccgtgggcgccgagcccaacacctttggaatccccggggtgaccgactacggtcacttcctgaaagaaatccccaacagcctggaaatccggcggactttcgccgccaacctagaaaaggccaacctgctgcctaagggcgaccccgagcggagaaggctgctgagcatcgtggtcgtgggcggaggccccacaggcgtggaagctgctggcgagctacaggattacgtgcaccaggacctgcggaagttcctgcctgccctggccgaggaagtccagattcacctggtggaagccctgcccatcgttctgaacatgtttgagaagaagctgagcagctacgcccagtcacacctggaaaacacttccatcaaggtgcacctgagaaccgctgtggccaaggtggaagagaagcagttgctggccaagaccaagcacgaggacggcaagattaccgaggaaaccatcccctacggcaccctgatttgggccaccggcaacaaggccagacccgtgatcaccgacctgttcaagaagatccccgagcagaacagcagcaagcggggcctggccgtgaacgacttcctgcaggtcaaaggcagcaacaacatcttcgccatcggcgacaacgcctttgccggcctgcctcctaccgcccaggtggcccaccaagaggccgagtacctggccaagaacttcgacaagatggcccagatccccaatttccagaagaacctgtcctcccggaaggataagatcgacctgttgttcgaggaaaacaacttcaagcccttcaagtacaacgacctgggcgccctggcctacctgggcagcgaaagagccattgccaccatcagaagcggcaagcggaccttctacaccggcggaggcctgatgaccttctacctgtggcggatcatctacctgagcatgatcctaagcgcccgcagcagactgaaggtgttcttcgactggatcaaactggccttcttcaagagggactttttcaagggcctgtga

SEQ ID NO: 970 - DNA, 1542 bp, Artificial Sequence
  source: /note="Description of Artificial Sequence: Synthetic polynucleotide"
atgctgagcaagaacctgtacagcaacaagcggctgctgaccagcaccaacaccctcgtgcgcttcgccagcaccagatccaccggcgtcgaaaacagcggggctggccccacctctttcaagaccatgaaggtcattgacccccagcacagcgacaagcccaacgtgctgatcctgggctctggctggggcgccatcagctttctgaagcacatcgacaccaagaagtacaacgtcagcatcatcagccccagaagctatttcatcttcacccccctgctgcctagcgcccctgtgggaaccgtggacgagaagtccatcatcgagcccatcgtgaacttcgccctgaagaaaaagggcaacgtcacctactacgaggcagaggccaccagcatcaaccccgaccggaacaccgtgaccatcaagagcctgagcgccgtttcccagctgtaccagcccgagaaccacctgggcctgcaccaggccgagcccgccgagattaagtacgactacctgatcagcgccgtgggcgccgagcccaacacctttggaatccccggcgtgaccgactacggtcacttcctgaaagagatccccaacagcctggaaatcagacggaccttcgccgccaacctggaaaaggccaacctgctgccaaagggcgaccccgagagaagaaggctgctgagcatcgtggtcgtgggcggaggccccacaggcgtggaggctgctggcgagctacaggactacgtgcaccaggacctgcggaagttcctgcccgccctggccgaggaaatccagattcacctggtggaagccctgcccatcgtgctgaacatgttcgagaagaagctgtcaagctacgcccagagccacctggaaaacacttcgatcaaggtacacctgagaaccgccgtggccaaggtggaagagaagcagctgctggccaagaccaagcacgaggacggcaagattaccgaggaaaccatcccctacggcaccctgatttgggccaccggcaacaaggccagacccgtgatcaccgacctgttcaagaagatccccgagcagaacagctccaagcggggcctggccgtgaacgacttcctgcaggtcaaaggcagcaacaacatcttcgccatcggcgacaacgcctttgccggcctgccacctacagcccaggtggcgcaccaggaggccgaatacttggccaagaacttcgacaagatggcccagatccccaatttccagaagaacctgtcctcacggaaggataagatcgacctgctgttcgaggaaaacaacttcaagcccttcaagtacaacgacctgggcgccttagcctacctgggcagcgaaagagccattgccaccatacgtagcggtaagcggaccttctacaccggcggaggcctgatgaccttctacctgtggcggatcctgtacctgagcatgatcctgagcgcaagaagcagactgaaggtgttcttcgactggatcaagctggccttcttcaagagggacttcttcaaaggcctgtga

SEQ ID NO: 971 - DNA, 1542 bp, Artificial Sequence
  source: /note="Description of Artificial Sequence: Synthetic polynucleotide"
atgctgagcaagaacctgtacagcaacaagcggctgctgacctcgaccaacaccctcgtgcgcttcgccagcaccagatccaccggcgtcgaaaacagcggggctggccccaccagctttaagaccatgaaaatcattgacccccagcacagcgacaagcccaacgtgctgatcctgggctctggctggggcgccatcagctttctgaagcacatcgacaccaagaagtacaacgtcagcatcatcagccccagaagctacttcctgttcacccccctgttacccagcgcccctgtgggaaccgtggacgagaagtccatcatcgagcccatcgtgaatttcgccctgaagaaaaagggcaacgtcacctactacgaggccgaggccaccagcatcaaccccgaccggaacaccgtgaccataaagagcctgagcgccgtgtcccagctgtaccagcccgagaaccacctgggcctgcaccaggccgagcccgccgagattaagtacgattacctgatcagcgccgtaggcgccgagcccaacacctttggaatccctggcgtgaccgactacggccacttcctgaaagagatccccaacagcctggaaatccggcggaccttcgccgccaacctggaaaaggccaacctgctgcctaagggcgaccccgaacggagaaggctgctgagcatcgtggtcgtgggcggaggccctactggcgtggaagctgctggcgagctacaggactacgtgcaccaggacctgcggaagttcctgcccgccctggccgaggaaatccagattcacttggtggaagccctgcccatcgtgctgaacatgttcgagaagaagcttagcagctacgcccagagccacctggaaaacacctccatcaaggtgcacctgagaaccgccgtggccaaggtggaagaaaagcagctgctggccaagaccaagcacgaggacggcaagattaccgaggaaaccatcccctacggcactctgatttgggccaccggcaacaaggcaagacccgtgatcaccgaccttttcaagaagatccccgagcagaacagcagcaagcggggcttggccgtgaacgacttcctgcaggtcaaaggcagcaacaacatcttcgccatcggcgacaatgcctttgccggcctgcctcctaccgcccaggtggcccaccaagaagccgaatacctggccaagaacttcgacaaaatggcccagatccccaatttccagaagaacctgtcctcccggaaggataagatcgacctgctgttcgaggaaaacaactttaagcccttcaagtacaacgacctgggcgccctggcctacctgggcagcgaaagagccattgccaccatcagaagcggcaagagaaccttctacaccggcggaggcctgatgaccttctacctgtggcggatcctgtacctgagcatgatcctgagcgcccgctcgagactgaaggtgttcttcgactggatcaagctggccttcttcaagagggacttctttaagggcctgtga

SEQ ID NO: 972 - DNA, 1542 bp, Artificial Sequence
  source: /note="Description of Artificial Sequence: Synthetic polynucleotide"
atgctgagcaagaacctgtacagcaacaagcggctgctcaccagcaccaacaccctcgtgcgcttcgccagcaccagatccaccggcgtcgaaaacagcggagctggtcccaccagcttcaagaccatgaaaatcatcgacccccagcacagcgacaaacccaacgtgctgatcctgggctctggctggggagccatcagctttctgaagcacatcgacaccaagaagtacaacgtcagcatcatcagccccagaagctacttcatcttcacccccctgctgcccagcgcccctgtgggaaccgtggacgagaagtccatcattgagcccatcgttaacttcgccctgaagaaaaagggcaacgtcacctactacgaggcagaggccaccagcatcaaccccgaccggaacaccgttaccatcaagagcctgtctgccgtgtcccagctgtaccagcccgagaaccacctgggcctgcaccaggccgagcccgccgagattaagtacgactacttaatcagcgccgtgggcgccgagcccaacacctttggaatccccggcgtcaccgactacggccacttcctgaaagagatccccaacagcctggaaatccggcggaccttcgccgccaacctggaaaaggccaacctgctgcctaagggcgaccccgagcggagaaggctgctgtccatcgtggtcgtgggcggaggccctacaggcgtggaagctgctggcgagctgcaggactacgtgcaccaggacctgcggaagttcctgcccgccctggccgaggaagtgcagattcacctggtcgaagccctgcccatcgtgctgaacatgttcgagaagaagcttagcagctacgcccaaagccacctggaaaacacctccatcaaggtgcacctgagaaccgccgtggccaaggtggaagagaagcagctgctggccaagaccaagcacgaggacggcaagattaccgaggaaaccatcccctacggcaccctgatttgggccaccggcaacaaggcaagacccgtgatcaccgacctgttcaagaagatccctgagcagaacagcagcaagcggggcctggccgtgaacgacttcctgcaggtcaaaggcagcaacaacatcttcgccatcggcgacaacgcctttgctggcctgcctccaacagcccaggtggcccaccaggaagccgaatacttggccaagaatttcgacaagatggcccagatccccaatttccagaagaacctgtcctcccggaaggataagatcgacctcctgttcgaggaaaacaacttcaagcccttcaagtacaacgacctgggcgccctggcctacctgggcagcgaaagagccattgccaccatcagaagcggcaagcggacattctacaccggcggtggcctgatgaccttctacctgtggcggatcctgtacctgagcatgatcctgagcgcccgcagcagactgaaggtgttcttcgactggatcaagctggccttcttcaagagggactttttcaagggcctgtga

SEQ ID NO: 973 - DNA, 1542 bp, Artificial Sequence
  source: /note="Description of Artificial Sequence: Synthetic polynucleotide"
atgctgagcaagaacctgtacagcaacaagcggctgctgacctcgaccaataccctcgtgcgcttcgccagcaccagatccaccggcgtcgaaaacagcggggctggccccaccagcttcaagaccatgaaggtcatcgacccccagcacagcgacaagcccaacgtgctgatcctgggctcggggtggggcgccatcagctttctgaagcacatcgacaccaagaagtacaacgtcagcatcgtgagccctagaagctacttcctgttcacccctctgctgcccagcgcccctgttgggaccgtagacgagaagtcaatcatcgagcccatcgtgaacttcgccctgaagaaaaagggcaacgtcacctactacgaggccgaggccaccagcatcaaccccgaccggaataccgtgaccatcaagagcctgagcgccgtgtcccagctgtaccagcccgagaaccacctgggcctgcaccaggccgagcccgccgagattaagtacgattacctgatcagcgccgtgggcgccgagcccaacacctttggaatccccggcgtgaccgactacggccacttcctgaaagagatccccaacagcctggaaatccggcggaccttcgccgccaacctggaaaaggccaacctgttgcctaagggcgaccccgagcggagaaggctgctgagcatcgtggtcgtgggcggaggccccacaggtgtggaagctgctggcgagctgcaggattacgtgcaccaggacctgcggaagttcctgcccgccctggccgaggaagtgcagattcacctggtggaagccctgcccatcgtgctgaacatgttcgagaaaaagctgagcagctacgcccaaagccacctggaaaacacctccatcaaagtacacctgagaaccgccgtggccaaggtggaagaaaagcagttgttggccaagaccaagcacgaggacggcaagattaccgaggaaaccatcccctacggcaccctgatttgggccaccggcaacaaggccagacccgtgatcacagacctgttcaagaagatccccgagcagaacagcagcaagcggggcctggccgtgaacgacttcctgcaggtcaaaggcagcaacaacatcttcgccatcggcgacaacgcctttgccggcctgcctcctaccgcccaggtggcccaccaggaagccgagtacctggccaagaacttcgacaaaatggcccagatccccaatttccagaagaacctgtcctccagaaaggataagattgacctgctgttcgaggaaaacaacttcaagcccttcaagtacaacgacctgggtgccctggcctacctgggcagcgaaagagccattgccaccatcagaagcggcaagcggaccttttacaccggcggaggcctgatgaccttctacctgtggcggatcctgtacatgagcatgatcctgagcgcccgcagcagactgaaggtgttcttcgactggatcaagctggccttcttcaaaagggacttcttcaagggcctgtga

SEQ ID NO: 974 - DNA, 1542 bp, Artificial Sequence
  source: /note="Description of Artificial Sequence: Synthetic polynucleotide"
atgctaagcaagaacctgtatagtaacaagcggctgctgaccagcaccaacaccctcgtgcgcttcgccagcaccagatccaccggcgtcgaaaacagcggggctggccctaccagcttcaagaccatgaagatcatcgacccccagcacagcgacaagcccaacgtgctgatcctgggctctggctggggcgccatcagctttctgaagcacattgacaccaagaagtacaacgtcagcatcatcagccccagaagctacttcatcttcacccccctgctgccctctgcccctgtgggaaccgtggacgagaagtccatcattgagcccatcgtgaacttcgccctgaagaaaaagggcaacgtcacctactacgaggccgaggccaccagcatcaaccccgaccggaacaccgtgaccatcaagagcctgagcgccgtgtcccagctgtaccagcccgagaaccacctgggcctgcaccaggccgagcccgccgagattaagtacgactacctgatcagcgccgtgggcgccgagcccaacacctttggaatccccggggtgaccgactacggccacttcctgaaagagatccccaacagcctggaaatccggcggaccttcgccgccaacctggaaaaggccaacctgttgcctaagggcgaccccgagcggagaaggctgctgtccatcgtggtcgtgggcggagggcccacaggcgtagaagctgctggcgagctgcaggactacgtgcaccaggacctgcggaagttcctgcccgccctggccgaggaagtccagattcacctggtggaagccctgcccatcgtgctgaacatgttcgagaagaagctgagcagctacgcccagagccacctggaaaacacctccatcaaggtgcacctgagaaccgccgtggccaaagtggaagagaagcagctgctggccaagaccaaacacgaggacggcaagataaccgaggaaaccattccctacggcaccctgatttgggccaccggcaacaaggccagacccgtgatcaccgacctgttcaagaagatccccgagcaaaacagcagcaagcggggcctggccgtgaacgacttcctgcaagtcaaaggcagcaacaacattttcgccatcggcgacaacgcctttgccggcctgcctccaacagcccaggtggcccaccaggaagccgaatacctggccaagaacttcgacaagatggcccagatccccaatttccagaagaacctgtcctccagaaaggataagatcgacctgctgttcgaggaaaacaacttcaagcccttcaagtacaacgacctgggcgccctggcctacctgggaagcgaaagagccattgccaccatcagaagcggcaagcggaccttctacaccggcggaggcttaatgaccttctacctgtggcggatcctgtacctgagcatgatcctaagcgcccgcagcagactgaaggtcttcttcgactggattaagctggcctttttcaagagggacttcttcaagggcctgtag

SEQ ID NO: 975 - DNA, 1542 bp, Artificial Sequence
  source: /note="Description of Artificial Sequence: Synthetic polynucleotide"
atgctgtcgaagaacctgtacagcaacaagcggttgctgaccagcaccaacaccctcgtgcgcttcgccagcaccagatccaccggcgtcgaaaacagcggggctggccccaccagctttaagaccatgaaggtcatcgacccccagcacagcgacaagcccaacgtgctgatcctgggctctggctggggcgccatcagctttctgaagcacatcgacaccaagaagtacaacgtcagcatcatcagccctagaagctacttcatctacacccccctgctgcccagcgcccctgtgggaaccgtggacgagaagtccatcatcgagcccatcgtgaacttcgccctgaagaaaaagggcaacgtcacctactacgaggccgaggccaccagcatcaaccccgaccggaataccgtgaccatcaagagcttaagcgccgtttcccagctgtaccagcccgagaaccacctgggcctgcatcaggccgagcccgccgagattaagtacgactacctgatcagcgccgtgggcgccgagcccaacacctttggaatccccggcgtgaccgactacggccacttcctgaaagagatccccaacagcctggaaatccggcggaccttcgccgccaacctggaaaaggccaacctgctgcctaagggcgaccccgagcggagaaggctgctgagcatcgtggtcgtgggcggtggccccactggcgtggaagctgctggcgagctgcaggactacgtgcaccaggacctgcggaagtttctccccgcactggccgaagaaatccagattcacctggtggaagccctgcccatcgtgctgaacatgttcgagaagaagctgagcagctacgcccagagccacctggaaaacacctccatcaaggtgcacctgagaacggccgtggccaaggtggaagagaagcagttgctggcaaagaccaagcacgaggacggcaagattaccgaggaaaccatcccctacggtaccctgatttgggccaccggcaacaaggccagacccgtgatcaccgacctgttcaagaagatccccgagcagaactcgagcaagcggggcttggccgtgaacgacttcctgcaggtcaaaggcagcaacaacattttcgccatcggcgacaatgcctttgccggcttgcctcctacagcccaggtggcccaccaggaagccgagtacctggccaagaacttcgacaagatggcccagatccccaatttccagaagaacctgtcctcccggaaggataagatcgatctgttgttcgaggaaaacaacttcaagcccttcaagtacaacgacctgggcgccttagcctacctgggcagcgaaagagccattgccaccatcagaagcggcaagagaaccttctacaccggcggaggcctgatgaccttctacctgtggcggatcctgtacctgagcatgatcctaagcgccagaagcagactgaaggtgttcttcgactggatcaagctggcattcttcaagagggacttcttcaagggcctgtga

SEQ ID NO: 976 - DNA, 1542 bp, Artificial Sequence
  source: /note="Description of Artificial Sequence: Synthetic polynucleotide"
atgctgagcaagaacctgtacagcaacaagcggttgctcaccagcaccaacaccctcgtgcgcttcgccagcaccagatccaccggcgtggaaaacagcggggctggccccaccagctttaagaccatgaagatcatcgacccccagcacagcgacaaacccaacgtgctgatcctgggctctggctggggcgccatcagctttctgaagcacatcgacaccaagaagtacaacgtcagcatcatcagccccagaagctacttcatcttcacccccctgttacccagcgcccctgtgggaaccgtggacgagaagtccatcatcgagcccatcgtgaacttcgccctgaagaaaaaggggaacgtcacctactatgaggccgaggccaccagcatcaaccccgaccggaacaccgtgaccatcaaaagcctgagcgccgtgtcccagctgtaccagcccgagaaccacctgggcctgcaccaggccgagcccgccgagattaagtacgactacctgatcagcgccgtgggcgccgagcccaacacctttggaattcccggcgtgaccgactacggccacttcctgaaagagatccccaacagcctggaaatcagacggaccttcgccgccaacctggaaaaggccaacctgctgcctaagggcgaccccgagcggagaaggctactgagcatcgtggtcgtgggcggaggccccacaggcgtggaagctgctggcgagctgcaggattacgttcaccaggacctgcggaagttcctgcccgccttggccgaggaaatccagattcacctggtggaagccctgcccatcgtgctgaacatgttcgagaagaagcttagcagctacgcccagagccacctggaaaacacctccatcaaggtgcacctgagaaccgccgtggccaaggtggaagagaagcagctgctggccaagaccaaacacgaggacggcaagattaccgaggaaaccatcccctacggcaccctgatttgggccaccggcaacaaggccagaccggtgatcaccgacctgttcaagaagatccccgagcagaacagcagcaagcggggcctggccgtgaacgacttcttgcaggtcaaaggcagcaacaacatcttcgccatcggcgacaacgcctttgctggcctgcctcctacagcccaggtggcccaccaggaagccgagtacctggccaagaacttcgacaagatggcccagatacccaatttccaaaagaacctgtcctcccggaaggataagatcgacctgctgttcgaggaaaacaacttcaagcccttcaagtacaacgacctgggcgccctggcatacctgggcagcgaaagagccattgcaaccatcagaagcggcaagcggaccttttacaccggcggtggcctgatgaccttctacctgtggcggatcctgtacctgagcatgattctgagcgcccgctcgagactgaaggtgttcttcgactggatcaagctggccttcttcaagagagacttctttaagggcctgtga

SEQ ID NO: 977 - DNA, 1542 bp, Artificial Sequence
  source: /note="Description of Artificial Sequence: Synthetic polynucleotide"
atgctgagcaagaacctgtacagcaacaagcggctgctgaccagcaccaacaccctcgtgcgcttcgccagcaccagatccaccggcgtcgaaaactccggggctggccccaccagcttcaagaccatgaagatcatcgacccccagcacagcgacaagcccaacgtgctgatcctgggctctggctggggcgctattagctttctgaagcacatcgacaccaagaagtacaacgtcagcatcgtgagccccagaagctatttcctgttcacccccctgctgccctctgcacctgtgggaaccgtggacgagaagtccattatcgagcccatcgtgaacttcgccctgaagaaaaagggcaacgtcacctactacgaggccgaggccaccagcatcaaccccgaccggaacaccgtgaccatcaagagcctgagcgccgtttcccagctgtaccagcccgagaaccacctgggcctgcaccaggccgagcccgccgagattaagtacgactacctgatcagcgccgtgggcgccgagcccaacacctttggtatccccggcgtgaccgactacggtcacttcctgaaagagatccccaacagcctggaaatccggcggaccttcgccgccaacctggaaaaggccaacctgttgcctaagggcgaccccgagcggagaaggctactgagcatcgtggtcgtgggcggaggccccacaggcgtggaagctgctggcgagctgcaggattatgttcaccaggacctgcggaagttcctccccgccctggccgaggaagtccagattcacctggtggaagccctgcccatcgtgctgaacatgttcgagaagaagctgtcaagctacgcccagagccacctggaaaacacctccatcaaggtgcacctgagaaccgccgtggccaaggtggaagagaagcagctgctggccaagacgaagcacgaggacggcaagattaccgaggaaaccatcccctacggcaccttgatttgggccaccggcaacaaggccagacccgtgatcaccgacctgttcaagaagatccccgagcagaacagcagcaagagaggactggccgtgaacgacttcttgcaggtcaaaggcagcaacaacatcttcgccatcggcgacaacgcctttgccggcctgcctcctacagcccaggtggcgcaccaggaagccgaatatctggccaagaacttcgacaagatggcccagatccccaatttccagaagaacctgtcctcccggaaggataagatcgacctgctgttcgaggaaaacaacttcaagcccttcaagtacaacgacttaggcgccctggcctacctgggaagcgaaagagccattgccaccatccgtagcggcaagcggaccttctacaccggcggaggcttaatgaccttctacctgtggcggatcatctacctgagcatgatcctgagcgcccgcagcagactgaaggtgttcttcgactggatcaagctggccttcttcaagagggacttcttcaagggcctgtga

SEQ ID NO: 978 - DNA, 1542 bp, Artificial Sequence
  source: /note="Description of Artificial Sequence: Synthetic polynucleotide"
atgctgagcaagaatctgtacagcaacaagcggctgctgaccagcaccaacaccctagtccgcttcgccagcaccagatccaccggcgtcgaaaacagcggggctggtcccaccagcttcaagaccatgaaggtcatcgacccccagcacagcgacaaacccaacgtgctgatcctgggctctggctggggcgccatcagctttctgaagcacatcgacaccaagaagtacaacgtcagcatcatcagccccagaagctacttcctgtacacccccctgctgcccagcgcccctgttggaaccgtggacgagaagtccatcatcgagcccatcgtgaacttcgccctgaagaaaaaggggaacgtcacctactacgaggccgaggccaccagcatcaaccccgaccggaacaccgtgaccatcaaaagcctgagcgccgtgtcccagctataccagcccgagaaccacctgggcctgcaccaagcagagcccgccgagattaagtacgactatctgatcagcgccgtgggcgccgagcccaacacctttggaattcccggcgtgaccgactacggccacttcctgaaagagatccccaacagcttggaaatacggcggaccttcgccgccaacctggagaaggccaacctgctgcctaagggcgaccccgagcggagaaggctgctgagcatcgtggtcgtgggcggaggccccacaggcgtggaagctgctggcgagctgcaggactacgtgcaccaggacctgcggaagtttctgcccgccctggccgaagaaatccagattcacctggtggaagccctgcccatcgtgctgaacatgttcgagaagaagctgagcagctacgcccagagccacctggaaaacacctccatcaaggtgcatctgagaaccgccgtggccaaggtggaagagaagcagctgctggccaagaccaagcacgaggacggcaagattaccgaggaaaccattccctacggcaccctgatttgggccaccggtaacaaggcaagacccgtgatcaccgacctgttcaagaagatccccgagcagaacagctccaagcggggcctggccgtgaacgacttcctgcaggtcaaaggcagcaacaacattttcgccatcggcgacaatgcctttgccggcctgcctcctacagcccaggtggcccaccaggaggccgagtacctggccaagaactttgacaagatggctcagatccccaatttccagaagaacctgtcctcccggaaggataagatcgacctgctgttcgaggaaaacaacttcaagcccttcaagtacaacgacctgggcgccctggcctacctgggcagcgaaagagccattgccaccatcagaagcggcaagcggaccttctacaccggcggaggcctgatgaccttctacctgtggcggatcctgtacatgagcatgatcctgagcgcccgcagcagactgaaggtgttcttcgactggatcaagctggcattcttcaaaagggacttcttcaagggcctgtga

SEQ ID NO: 979 - DNA, 1542 bp, Artificial Sequence
  source: /note="Description of Artificial Sequence: Synthetic polynucleotide"
atgctgagcaagaacctgtacagcaacaagaggctgctgaccagcaccaacaccctagtgcgcttcgccagcaccagatccaccggcgtcgaaaacagcggagctggccccaccagcttcaagaccatgaaggtcatcgacccccagcacagcgacaagcccaacgtgctgatcctgggttctggctggggcgccatcagctttctgaagcacatcgacaccaagaagtacaacgtcagcatcatcagccccagaagctacttcctgtacacccccctgctgccttctgccccagtgggaaccgtggacgagaagtccatcatcgagcccatcgtgaacttcgccctgaagaaaaagggcaacgtcacctactacgaggccgaggccaccagcatcaaccccgaccggaacaccgtgaccatcaagagcctgagcgccgtgtcccagctgtaccagcctgagaaccacctgggcctgcaccaggccgagcccgccgagattaagtacgattatctgatcagcgccgtgggcgccgagcccaacacctttggaatccccggcgtgaccgactacggccacttcctgaaagagatccccaacagcctggaaatccggcggaccttcgccgccaacctggaaaaggccaacctgctgcctaagggcgaccccgagcggagaaggctgctgagcatcgtcgtcgtgggcggaggccccacaggtgtggaagctgctggcgagctgcaggactacgtgcaccaggacctgcggaagttcctgcccgccctggccgaggaaatccagattcacctggtggaagctctgcccatcgttttgaacatgttcgagaagaagctgagcagctacgcccagagccacctggaaaacacctccatcaaggtgcacctgagaaccgccgtggccaaggtggaagagaagcagctgctggcaaagaccaagcacgaggacggcaagattaccgaggaaactatcccctacggcaccctgatttgggccaccggcaacaaggccagacccgtaatcaccgacctgttcaagaagatccccgagcagaacagcagcaagcggggcctggccgtgaacgacttcctgcaggtcaaaggcagcaacaacatcttcgccattggcgacaacgcctttgccggcttgcctcctacagcccaggtggcccaccaggaagccgagtacttggccaagaacttcgataagatggcccagatcccaaatttccagaagaacctgtcctcccggaaggataagatcgacctgctgttcgaggaaaacaactttaagcccttcaagtacaacgacctgggcgccctggcctacctgggctccgaaagagccattgccaccatcagaagcggtaagcggaccttctacaccggcggaggcctgatgaccttctacctgtggcggatcttgtacatgagcatgattctgagcgcccgcagcagactgaaggtgttcttcgactggatcaagctggcctttttcaagagggacttcttcaagggcctgtga

SEQ ID NO: 980 - DNA, 1542 bp, Artificial Sequence
  source: /note="Description of Artificial Sequence: Synthetic polynucleotide"
atgctgagcaagaacctgtacagcaacaagcggttgctgaccagcaccaacaccctcgtgcgcttcgccagcaccagatccaccggcgtcgaaaacagcggggctggccccaccagcttcaagaccatgaaagtcatcgacccccagcacagcgacaagccaaacgtgctgatactgggctctggctggggcgccatcagctttctgaagcacatcgacaccaagaagtacaacgttagcatcatcagccccagaagctacttcctgtacacccccttgctgcccagcgcccctgttggaaccgtggacgagaagtccatcatcgagcccatcgttaacttcgccctgaagaaaaagggcaacgtcacctactacgaggccgaggccaccagcatcaaccccgaccggaacaccgtgaccataaagagcctgagcgccgtgtcccagctgtaccagcccgagaaccacctggggctgcaccaagccgagcccgccgagattaagtacgactacctgatcagcgccgtgggcgccgagcctaacacctttggaatccccggcgtgaccgactacggccacttcctgaaagagatccccaacagcctggaaatccggcggaccttcgccgccaacctagaaaaggccaacctgctgcctaagggcgaccccgagcggagaaggctgctgagcatcgtggtcgtgggcggaggccccacaggcgtggaagctgctggcgagctgcaggactatgtgcaccaggacctgcggaagttcctgcccgccctggccgaggaagtgcaaattcacctggtggaagccctgcccatcgtgctgaacatgttcgagaagaagctgagcagctacgcccagagccatctggaaaacacctccatcaaggtgcacctgagaaccgccgtggccaaggtggaagagaagcaactgctggccaagaccaagcacgaagacggcaagattaccgaggaaaccatcccctacggcaccctgatttgggccacgggcaacaaggccagacccgtgatcaccgaccttttcaagaagatccccgagcagaacagctccaagcggggactggccgtgaacgacttcctgcaggtcaaaggcagcaacaacatcttcgccatcggcgacaacgcctttgccggcctgcctcctacagcccaggtggcccaccaggaagccgagtacctggccaagaattttgacaagatggcccagatccccaatttccagaagaacctgtcctcccggaaggataagatcgacctgctgttcgaggagaacaacttcaagcccttcaagtacaacgacctgggcgccttagcctacctgggcagcgaaagagccattgccaccatcagaagcggcaagcggaccttctacaccggcggtggcctgatgaccttctacttatggcggatcatctacatgagcatgattctgagcgcccgcagcagactgaaggtgtttttcgactggatcaagctggccttcttcaagagggacttcttcaagggcctgtga

SEQ ID NO: 981 - DNA, 1542 bp, Artificial Sequence
  source: /note="Description of Artificial Sequence: Synthetic polynucleotide"
atgctgagcaagaacctgtacagcaacaagaggctgctgaccagcaccaacaccctcgtgcgcttcgccagcaccagatccaccggcgtcgaaaacagcggggctggccccaccagctttaagaccatgaaggtcatcgacccccagcacagcgacaagcccaacgtgctgatcctgggctctggctggggcgccatcagctttctgaagcacatcgacaccaagaagtacaacgtcagcatcatcagccccagaagctacttcctgtacacccccctgctgcccagcgcccctgtgggaaccgtggacgagaagtccattatcgagcccatcgtgaacttcgccctgaagaaaaagggcaacgtcacctactacgaggcagaggccaccagcatcaaccccgaccggaataccgtgaccatcaagtcactgagcgccgtgtcccagctgtaccagcccgagaaccacctgggcctgcaccaggccgagcccgccgagattaagtacgactacctgatcagcgccgtaggcgccgagcccaacacctttggaatccccggcgtcaccgactacggccacttcctgaaagagatccccaacagcttggaaatccggcggaccttcgccgccaacctggaaaaggccaacttattgcctaagggcgaccccgagcggagaaggctgctgagcatcgtggtcgtgggcggaggccctacaggcgtggaagccgctggcgagctgcaggactacgtgcaccaggacctgcggaagttcctgcccgccttggccgaggaagtgcagattcacttggtggaagccctgcccatcgtgctgaacatgttcgagaagaagctgagcagctacgcccagagccacctggaaaacacctccatcaaggtgcacctgagaaccgccgtggccaaggtggaagaaaagcagctgctggccaagaccaagcacgaggacggcaagattaccgaagaaaccatcccctacggcaccctgatttgggccacgggcaacaaggccagaccggtgatcaccgacctgttcaagaagatccccgagcagaacagctccaagcggggactggccgtgaacgacttcctgcaggtcaaaggcagcaacaacatcttcgccatcggcgacaacgcctttgccggcctgcctcctacagcccaggtggcccaccaagaagccgaatatctggccaagaacttcgacaaaatggcccaaatccccaatttccagaagaacctgtcctcacggaaggataagatcgacctgctgttcgaggaaaacaacttcaagcccttcaagtacaacgacttaggcgccctggcctacctgggcagcgaaagagccattgccaccatcagaagcggcaagcggacattctacaccggtggaggcctgatgaccttctacctgtggcggatcatctacatgagcatgatcctgagcgcccgcagcagactgaaggtgttcttcgactggatcaagctggccttcttcaagagggacttcttcaagggcctgtga

SEQ ID NO: 982 - DNA, 1542 bp, Artificial Sequence
  source: /note="Description of Artificial Sequence: Synthetic polynucleotide"
atgctgagcaagaacctgtacagcaacaagcggctgctgaccagcaccaacaccctcgtgcgcttcgcctccaccagatccaccggcgtcgaaaacagcggggctggccctaccagcttcaagaccatgaagatcattgacccccagcacagcgacaagcccaacgtgctgatcctgggctctggctggggcgccattagctttctgaagcacatcgacaccaagaagtacaacgtcagcatcatcagccccagaagctacttcctgttcacccccctgctgcccagcgcccctgtgggaacagtggacgagaagtccatcatcgagcccatcgtgaatttcgccctgaagaaaaagggcaacgtcacctactacgaggccgaggccaccagcatcaatcccgaccggaacaccgtgaccatcaagagcttaagcgccgtgtcccagctgtaccagcccgagaaccacctagggctgcaccaggccgagcccgccgagattaagtacgactacctgatcagcgccgtgggcgccgagcccaacacctttggaatccccggcgtgaccgactacggccacttcctgaaagagatccccaacagcttggaaatccggcggaccttcgccgccaacctggaaaaggctaacctgctgcctaagggcgaccccgagcggagaaggctgctgagcatcgtggtcgtgggcggtggccccacaggcgtggaagccgctggcgagctgcaggactacgttcaccaggacctgcggaagttcctgcccgccttggccgaggaaatccagattcacctggtggaagccctgcccatcgtgctgaacatgttcgagaagaagctgagcagctacgcccagagccacctggaaaacacctccatcaaggtgcacctgagaaccgctgtggccaaggtggaagaaaagcagctgctggccaagaccaagcacgaggacggcaagattaccgaggaaaccatcccctacggcaccctgatttgggccaccggcaacaaggccagacccgtgatcaccgacctgttcaagaagatccccgagcagaacagcagcaagcggggcctggccgtgaacgacttcctgcaggtcaaaggcagcaacaacatcttcgccatcggcgacaacgcctttgccgggctgcctcctacagcccaggtggcccaccaagaagccgagtacctggccaagaacttcgacaagatggcccagatccccaatttccagaagaacctgtcctcacggaaggataagattgacctgctgttcgaggaaaacaactttaagcccttcaaatacaacgacctgggcgccctggcctacctgggcagcgaaagagccattgcaaccatcagaagcggcaagcggacattctacaccggcggaggcctgatgaccttctacctgtggcggatcttgtacatgagcatgatcctgagcgcccgctcgagactgaaggtgtttttcgactggatcaagttagccttcttcaagagggacttcttcaagggcctgtga

SEQ ID NO: 983 - DNA, 1542 bp, Artificial Sequence
  source: /note="Description of Artificial Sequence: Synthetic polynucleotide"
atgctgagcaagaacctgtatagtaacaagaggctgctcaccagcaccaacaccctcgtgcgcttcgccagcaccagatccaccggcgtcgaaaacagcggggctggccccaccagcttcaagaccatgaaggtcatcgacccccagcacagcgacaagcccaacgtgctgatcctgggctctggctggggcgctatcagctttctgaagcacatcgacaccaagaagtacaacgtcagcatcatctctcccagaagctacttcctgttcacgcccctgctgcccagcgcacctgtgggaaccgtggacgagaagtccatcatcgagcccatcgtgaacttcgccctgaagaaaaagggcaacgtcacctactacgaggccgaggccaccagcatcaaccccgaccggaacaccgtgaccatcaagagcctgagcgccgtgtcccagctgtaccagcctgagaaccacctgggcctgcaccaggcagagcccgccgagattaagtacgactacctgatcagcgccgtgggcgccgagcccaacacctttggaatccccggcgtgaccgactacggccacttcctgaaagagatccccaacagcctggaaatacggcggaccttcgccgccaacctggaaaaggccaacctgctgcctaagggcgaccccgagcggagaaggctgctgagcatcgtggtcgtgggcggaggccccactggcgtggaagctgctggcgagctgcaggactacgtgcaccaggacctgcggaagttcctgcctgccctggccgaggaaatccagattcacctggtggaagccctgcccatcgtgctgaacatgttcgagaagaagctgagctcatacgcccagagccacctggaaaacacctccatcaaggtgcacctgagaaccgccgtggccaaggtggaagaaaagcagctgctggccaagaccaagcacgaggacggcaagattaccgaggaaaccatcccatacggcaccctgatttgggccaccggcaacaaggccagacccgtgatcaccgacctgttcaagaagatccctgagcagaacagcagcaagcggggattggccgtgaacgacttcctgcaggtcaaaggcagcaacaacattttcgccatcggtgacaacgcctttgccgggctgcctcctacagcccaggtggcccaccaggaagccgagtacctggccaagaacttcgacaagatggcccagatacccaatttccagaagaacctgtcctcccggaaggataagatcgatctgctgttcgaggaaaacaacttcaagcccttcaagtacaacgacctgggcgccttagcctacctgggcagcgaaagagccattgccaccatacgtagcggtaagcggacattctacaccggcggaggcctgatgaccttctacctgtggcggatcatctacatgagcatgatcctgagcgcccgcagcagactgaaggtgttcttcgactggatcaagttagccttcttcaagagggacttcttcaagggcctgtga

SEQ ID NO: 984 - DNA, 1542 bp, Artificial Sequence
  source: /note="Description of Artificial Sequence: Synthetic polynucleotide"
atgctaagcaagaatttgtacagcaacaagcggctgctgaccagcaccaacaccctcgtgcgcttcgccagcaccagatccaccggggtcgaaaacagcggggcaggccccacctctttcaagaccatgaaggtcatcgacccccagcacagcgacaaacccaacgtgctgatcctgggctctggctggggcgccatcagctttctgaagcacatcgacaccaagaagtacaacgtcagcatcatctctcccagaagctacttcctgtacacccctctgctgcccagcgcccctgtgggaaccgtagacgagaagtccattatcgagcccatcgttaacttcgccctgaagaaaaagggcaacgtcacctactacgaggccgaggccaccagcatcaaccccgaccggaacaccgtgaccatcaagagcctgagcgccgtgtcccagctgtaccagcccgagaaccacctgggcctgcaccaggccgagcccgccgagattaagtacgactacctgatcagcgccgtgggcgcggagcccaacacctttggaattcccggcgtgaccgactacggccacttcctgaaagagattcccaacagcctggaaatccggcggaccttcgccgccaacctggaaaaggccaacttactgcctaagggcgatcccgagcggagaagactgctgagcatcgtggtcgtgggcggaggccccacaggcgtggaagctgctggcgagctgcaggactacgtgcaccaggacctgcggaagttcctgcccgccctggccgaagaagtgcagattcacctggtggaagccctgcccatcgtgctgaacatgttcgagaagaagctgagcagctacgcccagagccatctggaaaacacctccatcaaggtgcacctgagaaccgccgtggccaaggtggaagagaagcagctgctggccaagaccaagcacgaggacggcaaaattaccgaggaaaccatcccctacggcaccctgatttgggccaccggcaacaaggcaagacccgtgatcaccgacctgttcaagaagatccccgagcagaacagcagcaagcggggcctggccgtgaacgacttcttgcaggtcaaaggcagcaacaacatcttcgccatcggcgacaatgcctttgccggcctgcctcctacagcccaagtggcccaccaggaagccgagtacctggccaagaatttcgacaaaatggctcagatccccaatttccagaagaacctgtcctcccggaaggataagatcgacctgctgttcgaggaaaacaacttcaagcccttcaagtacaacgacctgggcgccctggcctacctgggcagcgaaagagccattgccaccatcagaagcggcaagcggaccttctacaccggcggaggcctgatgaccttctacttatggcggatcatctacatgagcatgatcctgagcgcccgcagcagactgaaggtgttcttcgactggatcaagctggccttcttcaagagggacttcttcaaaggcctgtga

SEQ ID NO: 985 - DNA, 1542 bp, Artificial Sequence
  source: /note="Description of Artificial Sequence: Synthetic polynucleotide"
atgctgagcaagaacctgtacagcaacaagcggctgctgaccagcaccaacaccctcgtgcgcttcgccagcaccagatccaccggcgtcgaaaacagcggggctggccccaccagctttaagaccatgaaaatcatcgacccccagcacagcgacaagcccaacgtgctgatcctgggctctggctggggagccatcagctttctgaagcacatcgacaccaagaagtacaacgtcagcatcatcagccctagaagctacttcatcttcacccccctgctgcctagcgcccctgtgggaaccgtggacgagaagtcaatcatcgagcccatcgtgaacttcgccctgaagaaaaagggcaacgtcacctactacgaggccgaggccaccagcatcaaccccgaccggaacaccgtgaccataaagtcactgagcgccgtgtcccagctgtaccagcctgagaaccacctagggctgcaccaggccgagcccgccgagattaagtacgactacctgatcagcgctgtgggcgccgagcccaacacctttggaatccccggcgtgaccgactacggccacttcctgaaagaaatccccaacagcctggaaatccggcggactttcgccgccaacctggaaaaggccaacctgctgcctaagggcgaccccgaacggagaaggctgctgtccatcgtcgtcgtgggcggaggccccacaggcgtggaagctgctggcgagctgcaggactacgtgcaccaggacctgcggaagttcctgcccgccctggccgaagaagtgcagattcacctggtggaagccctgcccatcgtgctgaatatgtttgagaagaagctgagcagctacgcccagagccacctggaaaacacctccatcaaggtgcacctgagaaccgccgtggccaaggtggaagaaaagcagctgctggccaagaccaagcacgaggacggtaagattaccgaggaaaccatcccctacggcaccctgatttgggccaccggcaacaaggccagacccgtgatcaccgacctgttcaagaagatccctgagcagaacagcagcaagagaggcctggccgtgaacgacttcctgcaggtcaaaggcagcaacaacattttcgccatcggcgacaacgcctttgccggcctgccacctacagcccaggtggcccaccaggaagccgagtacctggccaagaacttcgacaagatggcccagatccccaatttccagaagaacctatcctcccggaaggataagatcgacctgttgttcgaggaaaacaacttcaagcccttcaagtacaacgacctgggcgccctggcctacctgggcagcgaaagagccattgccaccatccgtagcggcaagcggaccttctacaccggcggaggcctgatgaccttctacctgtggcggatcatctacatgagcatgattctgagcgcccgcagcagactgaaggtgttcttcgactggatcaagctggccttcttcaagagggacttcttcaagggcctgtga

SEQ ID NO: 986 - DNA, 1542 bp, Artificial Sequence
  source: /note="Description of Artificial Sequence: Synthetic polynucleotide"
atgctgagcaagaacttgtacagcaacaagcggttgctgaccagcaccaacaccctcgtgcgcttcgccagcaccagatccacaggcgtcgaaaacagcggggctggccccaccagcttcaagaccatgaagatcatcgacccccagcacagcgacaagcccaacgtgctgatcctgggctctggctggggcgccatcagctttctgaagcacatcgacaccaagaagtacaacgtcagcatcgtgagccccagaagctacttcctgttcacccccctgctgcccagcgcccctgtgggaaccgtggacgagaagtccatcatcgagcccatcgtgaacttcgccctgaagaaaaagggcaacgtcacctactacgaggccgaagccaccagcatcaaccccgaccggaacaccgtgaccatcaagtcactgagcgccgtgtcccagctgtaccagcccgagaaccacctgggcctgcaccaggccgagcccgccgagattaagtacgactacctgatcagcgctgtgggcgccgagcccaacacctttggaattcccggcgtgaccgactacggccacttcctgaaagagatccccaacagcctggaaatcagacggaccttcgccgccaacctagagaaggccaacctgctgcctaagggcgaccccgagcggagaaggctgctgagcatcgtggtcgttggcggaggccccacaggcgtggaagctgctggcgagctgcaggattacgtgcaccaggacctgcggaagttcctgcccgccctggccgaggaaatccagattcacctggtggaagccctgcccatcgtgctgaacatgttcgagaagaagctgagcagctacgcccagagccacctggaaaacacctcgatcaaggtgcacctgagaaccgctgtggccaaggtggaagagaagcagttgctggccaagaccaagcacgaggacggcaagattaccgaggaaaccattccctacggcaccctgatttgggccaccggcaacaaggcaagacccgtgatcaccgacctgttcaagaagatccccgagcagaacagcagcaagcggggcctggccgtgaatgacttcctgcaggtcaaaggcagcaacaacatcttcgccatcggcgacaacgcatttgccggcctgcctcctacagcccaggtggcccaccaggaagccgagtacctggccaagaactttgacaagatggcccagatccccaatttccaaaagaatctgtcctcacggaaggataagattgacctgctgttcgaggaaaacaacttcaagcccttcaagtacaacgacctgggcgccctggcctacctgggcagcgaaagggccattgccaccatcagaagcggcaagcggaccttctacaccggcggaggcctgatgaccttctacttatggcggatcatctacctgagcatgatcctatctgcccgcagcagactgaaggtgttcttcgactggatcaagttagccttcttcaagagggacttcttcaagggcctgtag

SEQ ID NO: 987 - DNA, 1542 bp, Artificial Sequence
  source: /note="Description of Artificial Sequence: Synthetic polynucleotide"
atgctgagcaagaacctgtacagcaacaagcggctgctgaccagcaccaacaccctcgtgcgcttcgccagcaccagatccaccggggtcgaaaacagcggggctggccccaccagcttcaagaccatgaagatcatcgacccccagcacagcgacaaaccaaacgtgctgatcctgggctctgggtggggcgccatcagctttctgaagcacatcgacaccaagaagtacaacgtcagcatcatcagccccagaagctacttcctgtacacccccctgctgcccagcgcccctgtgggaaccgtggacgagaagtccatcatcgagcccatcgtgaacttcgccctgaagaaaaagggcaacgtcacctactacgaggccgaagccaccagcatcaaccccgaccggaacaccgtgaccataaagagcctgagcgccgtgagccagctgtaccagcccgagaaccacctgggcctgcaccaagccgagcccgccgagattaagtacgactacctgatcagcgccgtgggcgccgagcccaacacctttggaatccccggcgtcaccgattacggccacttcctgaaagagatccccaactctttggaaatcagacggactttcgccgccaacctggaaaaggccaacctgttgcctaagggcgaccccgagcggagaaggctgctgagcatcgtggtcgtgggcggaggccctactggcgtggaggctgctggcgagctgcaggactacgtgcaccaggacctgcggaagttcctgcccgccctggccgaggaaatccagattcacctggtggaagctctgcccatcgtgctgaacatgttcgagaagaagctgagcagctacgcccagagccatctggaaaacacttccatcaaggtgcacctgagaaccgccgtggccaaggtggaagagaagcagctgctggccaagaccaagcacgaggacggcaagattaccgaagaaaccatcccctacggcaccctgatttgggccaccggcaacaaggccagacccgtgatcaccgacctgttcaagaagatccccgagcagaacagcagcaagcggggcctggccgtgaatgacttcctgcaggtcaaaggcagcaacaacatcttcgccatcggcgacaacgcctttgccggcctgcctccaaccgcccaagtggcccaccaggaagccgagtacctggccaagaacttcgacaagatggcccaaatccccaatttccagaagaatctgtcctccagaaaggataagatcgacctgctgttcgaggaaaacaacttcaagcccttcaagtacaacgacctgggcgccctggcctacctgggcagcgaaagagccattgccaccatcagaagcggcaagcggaccttctacaccggcggaggcctgatgaccttctacctgtggcggatcctgtacatgtccatgatcctgagcgcccgcagcagactgaaggtgttcttcgactggatcaagctggccttcttcaagagggacttcttcaagggcctgtga

SEQ ID NO: 988 - DNA, 1542 bp, Artificial Sequence
  source: /note="Description of Artificial Sequence: Synthetic polynucleotide"
atgctaagcaagaacctgtacagcaacaagcggctgctgaccagcaccaacaccctcgtccgcttcgccagcaccagatccaccggcgtcgaaaacagcggggctggccccaccagcttcaagaccatgaaggtcatcgacccccagcacagcgacaagcccaacgtgctgatcctgggctctggctggggcgccatcagctttttaaagcacatcgacaccaagaagtacaacgtctccatcgtgagccccagaagctacttcctgttcacccccctgctgcccagcgcacctgtgggaaccgtggacgaaaagtccatcatcgagcccatcgtgaactttgccctgaagaaaaagggcaacgtcacctactacgaggccgaggccacctctatcaaccccgacaggaacaccgtgaccatcaagagcttaagcgccgtgtcccagctataccagcccgagaaccacctgggcctgcaccaggccgagcccgccgagattaagtacgactacctgatcagcgccgtgggcgccgagcccaacacctttggaatccccggcgtcaccgactacggccacttcctgaaagagatccccaacagcttggaaatccggcggaccttcgccgccaacctagaaaaggccaacctgctgccaaagggcgaccccgagcggagaaggctgctgtccatcgtggtcgtgggcggaggccccactggcgtggaagctgctggcgagctgcaggactacgtgcaccaggacctgcggaagttcctgcccgccctggccgaagaaatccagattcacctggtggaagccctgcccatcgtgctgaacatgttcgagaagaagctgtcaagctacgcccagagccacttagaaaacacctccatcaaggtgcacctgagaaccgccgtggccaaggtggaagagaagcagctgctggccaagaccaagcacgaggacggcaagattaccgaggaaactatcccctacggcaccttgatttgggccaccggcaacaaggccagacccgtgatcaccgacctgttcaagaagatccctgagcagaacagcagcaagcggggcctggccgtgaacgacttcctgcaggtcaaaggcagcaacaacatcttcgccatcggcgacaacgcctttgccggcctgcctccaacagcccaggtggcccaccaagaagccgagtacctggccaagaacttcgacaagatggcccagatccccaatttccagaagaacctgtcctcccggaaggataagatcgacctgctgttcgaggaaaacaacttcaagcccttcaagtacaacgacctgggcgccttagcctacctgggcagcgaaagagccattgccaccatcagaagcggcaagcggaccttttacaccggcggaggcctgatgaccttctacctgtggcggattatctacatgagcatgatcctgagcgcccgcagcagactgaaggtgtttttcgactggatcaagctggccttcttcaagagggacttcttcaagggcctgtga

SEQ ID NO: 989 - DNA, 1542 bp, Artificial Sequence
  source: /note="Description of Artificial Sequence: Synthetic polynucleotide"
atgctgagcaagaacctgtatagcaacaagcggctgctcaccagcaccaacaccctcgtgcgcttcgccagcaccagatccaccggcgtcgaaaacagcggggctggccccacctctttcaagaccatgaaggtcatcgacccccagcacagcgacaagcccaacgtgctgatcctgggctctgggtggggcgccatcagctttctgaagcacatcgacaccaagaagtacaacgttagcatcatcagccccagaagctacttcatctacacccccctgttacccagcgcccctgtgggaaccgtagacgagaagtccatcatcgagcccatcgtgaacttcgccctgaagaaaaagggcaacgtcacctactacgaggccgaagccaccagcatcaaccccgaccggaacaccgtgaccatcaagagcctgagcgccgtgtcccagctgtaccagcccgagaaccacctgggcctgcaccaggccgagcccgctgagattaagtacgactacctgatcagcgccgtgggcgccgagcccaacacctttggaatccccggcgtgaccgactacggccacttcctgaaagagatccccaacagcctggaaatccggcggaccttcgccgccaacctggaaaaggccaacctgctgcctaagggcgaccccgagcggagaaggctgctgagcatcgtcgtcgtgggcggaggccccacaggtgtggaagctgctggcgagctgcaggactacgtgcaccaggacctgcggaagtttctgcccgccctggccgaggaaatccagattcacctggtggaagccctgcccatcgtgctgaacatgttcgagaagaagctgagcagctacgcccagagccatctggaaaacacctccatcaaggtacacctgagaacggccgtggccaaggtggaagagaagcagctgctggccaagaccaagcacgaggacggcaagattaccgaagaaactatcccctacggcaccttgatttgggccaccggcaacaaggccagacccgtgatcaccgaccttttcaagaagatccccgagcagaacagctccaagcggggcctggccgtgaacgacttcctgcaagtcaaaggcagcaacaacatcttcgccatcggcgacaatgcctttgccggcctgcctcctacagcccaggtggcccaccaggaagccgagtatctggccaagaatttcgacaagatggcccagatccccaatttccagaagaacctgtcctcccggaaggataagatcgacctgctgttcgaggaaaacaacttcaagcccttcaagtacaacgacctgggcgccctggcctacctgggaagcgaaagagccattgccaccatcagaagcggtaagagaaccttctacaccggcggaggcctgatgaccttctacctgtggcggatcatctacctgagcatgatcctgagcgcacgctcgagactgaaggtgttcttcgactggatcaagctggccttcttcaagagggacttcttcaagggcttatga

SEQ ID NO: 990 - DNA, 1542 bp, Artificial Sequence
  source: /note="Description of Artificial Sequence: Synthetic polynucleotide"
atgctgagcaagaacctgtatagtaacaagcggctgctgaccagcaccaacacgctcgtgcgcttcgctagcaccagatccaccggcgtcgaaaacagcggggctggccccaccagcttcaagaccatgaaggtcatcgacccccagcacagcgacaagcccaacgtgctgatactgggctcgggctggggagccatcagctttctgaagcacatcgacaccaagaagtacaacgtcagcatcgtgtctcccagaagctacttcctgtacacccccttgctgcccagcgcccctgtgggaaccgtggacgagaagtccatcatcgagcccatcgtgaacttcgctctgaagaaaaagggcaacgtcacctactacgaggccgaggccaccagcatcaaccccgaccggaacaccgtgaccatcaagagcctgagcgccgtgtcccagctgtaccagcccgagaaccacctgggcctgcaccaggccgagcccgccgagattaagtacgactacctgatcagcgccgtgggcgcggagcccaacacctttggaatccccggcgtgaccgactacggccatttcctgaaagagatccccaacagcctggaaatacggcggaccttcgccgccaacctggaaaaggccaacctgctgcctaagggcgaccccgagcggagaaggctgctgagcatcgtggtcgtgggcggaggccccacaggcgtggaagctgctggcgagctgcaggactacgtgcaccaggacctgagaaagttcctgcctgcactggccgaggaaatccagattcacctggtggaagccctgcccatcgtgttgaacatgttcgagaagaagctgagcagctacgcccagagccacctggaaaacacctccatcaaggtacacctgagaaccgccgtggccaaggtggaagagaagcagctgctggccaagaccaagcacgaggacggcaagattaccgaggaaaccatcccctacggcaccctgatttgggccaccggcaacaaggccagacccgtgatcaccgacctgttcaagaagatccccgagcaaaacagcagcaagcggggcctggccgtgaacgacttcctgcaggtcaaaggcagcaacaacatcttcgccatcggcgacaacgcatttgccggcctgcctcctacagcccaggtggcccaccaggaagccgagtacctggccaagaatttcgacaagatggcccagatccccaatttccagaagaacctgtcctcccggaaggataagatcgacctgctgttcgaggaaaacaacttcaagcccttcaagtacaacgacttaggcgccctggcctacctgggaagcgaaagagccattgcaaccatcagatccggcaagcggacattctacaccggcggaggcttaatgaccttctacctgtggcggattctgtacatgagcatgatcctgagcgcccgcagcagactgaaggtgttcttcgactggatcaagctggccttcttcaagagggacttcttcaagggcctgtga

SEQ ID NO: 991 - DNA, 1542 bp, Artificial Sequence
  source: /note="Description of Artificial Sequence: Synthetic polynucleotide"
atgctgagcaagaacctgtacagtaacaagcggctgctgaccagcaccaacaccctcgtgcgcttcgcctccaccagatccaccggcgtcgaaaactccggggctggccccaccagcttcaagaccatgaaagtcatcgacccccagcacagcgacaagcccaacgtgctgatcctgggctctggctggggagccatcagctttctgaagcacatcgacaccaagaagtacaacgtcagcatcgtgagccccagaagctatttcatctacacccccctgctgcccagcgcacctgtgggaaccgtggacgagaagtccatcatcgagcccatcgtgaacttcgctctcaagaaaaagggcaacgtcacctactacgaggccgaggccaccagcatcaaccccgaccggaacaccgtgaccatcaagtcactgtctgccgtgtcccagctgtaccagcccgagaaccacctgggcctgcaccaggccgagcccgccgagattaagtacgactacctgatcagcgccgtgggcgccgagcccaacacatttggaatccccggcgtgaccgactacggccacttcctgaaagagatccccaacagcctggaaatccggagaaccttcgccgccaacctggaaaaggccaacctgctgcctaagggcgaccccgaacggagaaggctgctgtccatcgtggtcgtgggcggaggccccacaggcgtggaagctgctggcgagctgcaggactatgtgcaccaggacctgcggaagttcctgcccgccctggccgaggaaatccagattcacctggtggaagccctgcccatcgtgttgaacatgttcgagaagaagctgagcagctacgcccagagccacctggaaaacacctccatcaaggtgcatctgagaacggccgtggccaaggtggaagagaagcagctgctggccaagaccaagcacgaggacggcaagattaccgaggaaaccatcccctacggcactctgatttgggccaccggcaacaaggccagacccgtaatcaccgacctgttcaagaagatccccgagcagaacagcagcaagcggggcctggccgtgaacgacttcctgcaggtcaaaggcagcaacaacatcttcgccatcggcgacaacgcctttgccggcctgccacctacagcccaagtggcccaccaagaagccgagtatctggccaagaacttcgacaagatggctcagatccccaatttccagaagaacctgtcttcccggaaggataagatcgacctgctgttcgaggaaaacaacttcaagcccttcaagtacaacgacctgggcgccctggcctacctgggcagcgaaagagccattgccaccatcagaagcggcaagcggaccttctacaccggcggtggcctgatgaccttctacctgtggcggatcctgtacctgagcatgatcctgagcgcccgcagcagactgaaggtgttcttcgactggatcaagctggccttcttcaaaagggacttctttaagggcctgtga

SEQ ID NO: 992 - DNA, 1542 bp, Artificial Sequence
  source: /note="Description of Artificial Sequence: Synthetic polynucleotide"
atgctgagcaagaacctgtacagcaacaagcggctgctgaccagcaccaacaccctcgtgcgcttcgcctccaccagatccaccggcgtggaaaacagcggggctggtcccacctctttcaagaccatgaaggtcatcgacccccagcacagcgacaagcccaacgtgctgatcctgggctcgggctggggcgccatcagctttctgaagcacatcgacaccaagaagtacaacgtcagcatcatctctcccagaagctacttcctgtacacccccctgctgcccagcgccccagtgggaaccgtggacgaaaagtcaatcatcgagcccatcgtgaacttcgccctgaagaaaaagggcaacgtcacctactacgaggccgaagccaccagcatcaaccccgaccggaacaccgtgaccatcaagagcctgagcgccgtgagccagctgtaccagcccgagaaccacctgggcctgcaccaggccgagcccgccgagattaagtacgactacctgatcagcgccgtgggcgccgagcccaacacctttggaatccccggcgtgactgactacggccacttcctgaaagagatccccaacagcctggaaatccggcggaccttcgccgccaacctggaaaaggccaacctgttgcctaagggtgaccccgagcggagaaggctactgagcatcgtggtcgtgggcggaggccccacaggcgtggaagctgctggcgagctgcaggactacgtgcaccaggacctgcggaagttcctccccgccctggccgaggaaatccagattcacctggtggaagccctgcccatcgtgctgaacatgttcgagaagaagctgagcagctacgcccagagccacctggaaaacacttcgatcaaggtgcacctgagaaccgctgtggccaaggtggaagagaagcagctgctggccaagaccaagcacgaggacggcaagattaccgaggaaaccatcccctacggcaccctgatttgggccaccggcaacaaggccagacccgtgatcaccgacctgttcaagaagatccccgagcagaacagcagcaagcggggcctggccgtgaacgactttttgcaagtcaaaggcagcaacaacatcttcgccatcggcgacaacgcctttgccgggctgcctcctacagcccaggtggcccaccaggaagccgagtacctggccaagaacttcgacaagatggcccagatccccaatttccagaagaacctgtcctcccggaaggataagatcgatctgctgttcgaggaaaacaacttcaagcccttcaagtacaacgacctgggcgccctggcctacctgggctccgaaagagccattgccaccatcagaagcggcaagcggaccttctacaccggcggtggcctgatgaccttctacctgtggcggatcatctacatgagcatgatcctaagcgcccgcagcagattaaaggtgtttttcgactggatcaagctggccttcttcaagagggacttcttcaagggcctgtga

SEQ ID NO: 993 - DNA, 1542 bp, Artificial Sequence
  source: /note="Description of Artificial Sequence: Synthetic polynucleotide"
atgctgagcaagaatctgtatagcaacaagcggctgctgaccagcaccaataccctcgtgcgcttcgccagcaccagatccaccggggtcgaaaacagcggggctggccccaccagcttcaagaccatgaagatcattgacccccagcacagcgacaagcccaacgtgctgatactgggctcgggctggggcgccatcagctttctgaagcacatcgacaccaagaagtacaacgtcagcatcgtgagccccagaagctacttcctgtacacccccttgctgcccagcgcccctgtgggaaccgtggacgagaagtccatcattgagcccatcgtgaacttcgccctgaagaaaaagggcaacgtcacctactacgaggccgaggccaccagcatcaaccccgaccggaacaccgttaccatcaagagcctgagcgccgtgtcccagctgtaccagcccgagaaccacctgggcctgcaccaggccgagcccgccgagattaagtacgactacctgatcagcgccgtgggcgccgagcccaacacctttggaatccctggcgtgaccgactacggccatttcctgaaagagatccccaacagcctggaaatccggcggacctttgccgccaacctggaaaaggccaacctgctgcctaagggcgaccccgagcggagaagactgctgtccatcgtggtcgtgggcggaggccccacaggcgtggaagctgctggcgagctgcaggactacgttcaccaggacctgcggaagttcctgcccgccctggccgaagaagtgcagattcacctggtggaagccctgcccatcgtgctgaacatgtttgagaagaagcttagcagctacgcccagagccacctggaaaacacctccatcaaggtgcacctgagaaccgccgtggccaaggtggaagagaagcagctgctggccaagaccaagcacgaggacggcaagataaccgaggaaactatcccctacggcaccctgatttgggccaccggcaacaaggccagacccgtgatcaccgacctgttcaagaaaatccctgagcagaacagcagcaagcggggcctggccgtgaacgacttcctgcaggtcaaaggcagcaacaacatcttcgccatcggcgacaacgcatttgccggcctgcctcctacagcccaggtggcccaccaagaagccgagtacctggccaagaacttcgacaagatggcccagatccccaatttccagaagaacctatcctcccggaaggataagattgacctgctgttcgaggaaaacaacttcaagcccttcaagtacaacgacctgggcgccctggcctacctgggcagcgaaagagccattgccaccatcagaagcggcaagcggaccttctacaccggcggaggcctgatgaccttctacctgtggagaatcctgtacatgagcatgattctgagcgcccgcagcagactgaaggtgttcttcgactggatcaagctggccttcttcaagagggacttcttcaagggactgtga

SEQ ID NO: 994 - DNA, 1542 bp, Artificial Sequence
  source: /note="Description of Artificial Sequence: Synthetic polynucleotide"
atgctgagcaagaacctgtacagcaacaagcggctgctgaccagcaccaacaccctcgtgcgcttcgccagcaccagatccaccggggtcgaaaacagcggggcaggccccaccagcttcaagaccatgaagatcattgacccccagcacagcgacaagcccaacgtgctgatcctgggctctggctggggcgctatctcgtttctgaagcacattgacaccaagaagtacaacgtcagcatcgtgagccccagaagctacttcctgttcacgcccttgctgcccagcgcccctgtggggacagtagacgagaagtccatcatcgagcccatcgtgaacttcgccctgaagaaaaagggcaacgtcacctactacgaggccgaggccaccagcatcaaccccgaccggaacaccgtgaccatcaagagcctgagcgccgtgtcccagctgtaccaacccgagaaccacctgggcctgcaccaggccgagcccgccgagattaagtacgactacctgatcagcgctgtgggcgccgagcccaacacatttggaatccccggcgtcaccgactacggccacttcctgaaagagatccccaacagcctggaaatccggagaaccttcgccgccaacctggaaaaggccaacctgctgcctaagggcgaccccgagcggagaaggctactgagcattgtggtcgtgggcggaggccccacaggcgtggaagctgctggcgagctgcaggactacgttcaccaggacctgcggaagttcctgcccgccctggccgaggaaatccagattcacctggtcgaagccctgcccatcgtgctgaacatgttcgagaagaagctgagcagctacgcccaatcacacttagaaaacacctccatcaaggtgcacctgagaaccgccgtggccaaggtggaagagaagcagctgctggccaagaccaagcacgaggacggcaagattaccgaggaaaccatcccctacggcaccctgatttgggccaccggtaacaaggccagacccgtgatcaccgacctgttcaagaagatccctgagcagaacagcagcaagcggggcctggccgtgaacgacttcctgcaagtcaaaggcagcaacaacatcttcgccatcggcgacaacgcctttgccggcctgcctccaacagcccaggtggcccaccaggaagccgagtacctggccaagaacttcgacaagatggcccagatcccaaatttccaaaagaacctgtcctcccggaaggataaaatcgacctgctgttcgaggaaaacaacttcaagcccttcaagtacaacgacctgggcgccctggcctacctgggcagcgaaagagccattgccaccatcagaagcggcaagcggaccttctacaccggcggaggcctgatgaccttctacctgtggcggatcatctacctgagcatgatcctgagcgcccgcagcagactgaaggtgttcttcgactggatcaagctggccttcttcaagagggacttcttcaagggcctgtga

SEQ ID NO: 995 - DNA, 1542 bp, Artificial Sequence
  source: /note="Description of Artificial Sequence: Synthetic polynucleotide"
atgctgagcaagaacctgtatagcaacaagaggctgctgaccagcaccaacacgctcgtgcgcttcgccagcaccagatccacaggcgtggaaaacagcggggctggccccaccagcttcaagaccatgaaggtcatcgacccccagcacagcgacaaacccaacgtgctgatcctgggctcgggctggggcgccatctcgtttctgaagcacatcgacaccaagaagtacaacgtcagcatcgtgagccccagaagctacttcatcttcacccccctgctgcccagcgcccctgtgggaaccgtggacgagaagtccatcatcgagcccatcgtgaacttcgccctgaagaaaaagggcaacgtcacctactacgaggccgaggccaccagcatcaatcccgaccggaacaccgtgaccatcaagagcctgagcgccgtgtcccagctgtaccagcccgagaaccacctggggctgcaccaggccgaacccgccgagattaagtacgactacctgatcagtgccgtgggcgccgagcccaacacctttggaatccccggcgtgaccgactacggccacttcctgaaagagatccccaacagcttggaaatccggcggaccttcgccgccaacctggaaaaggccaacctgctgcctaagggcgaccccgagcggagaagactgctgagcatcgtggtcgttggcggaggccccacaggcgtggaagctgctggcgagctgcaggactacgtgcaccaggacctgcggaagttcctccctgccctggccgaggaaatccagattcacctggtggaagccctgcccatcgtgctgaacatgttcgagaagaagctgagcagctacgcccagagccacctggaaaacacctccatcaaggtgcacctgagaaccgccgtggccaaggtggaagagaagcagctgctggccaagaccaagcacgaggacggcaaaattaccgaggaaactatcccctacggcaccttgatttgggccaccggtaacaaggcaagacccgtgatcaccgacctgttcaagaagatccccgagcagaacagcagcaagagaggcctggccgtgaacgacttcctgcaggtcaaaggcagcaacaacatcttcgccatcggcgacaacgcctttgctggcctgcctcctacagcccaggtggcccaccaggaagccgagtacctggccaagaactttgacaagatggcccagatccccaatttccagaagaacctgtcctcccggaaggataagatcgacctgctgttcgaggaaaacaactttaagcccttcaagtacaacgacttaggcgccctggcctacctgggcagcgaaagggccattgccaccatcagaagcggcaagcggaccttctacaccggcggaggcctgatgaccttctacctgtggcggatcatctacatgagcatgatcctgagcgcccgcagcagactgaaggtgttcttcgactggatcaaactggccttcttcaagagggacttcttcaagggcttatga

SEQ ID NO: 996 - DNA, 1542 bp, Artificial Sequence
  source: /note="Description of Artificial Sequence: Synthetic polynucleotide"
atgctgagcaagaacctgtacagcaacaagaggctgctgaccagcaccaacaccctcgtgcgcttcgccagcaccagatccaccggcgtcgaaaacagcggggctggccccaccagctttaagaccatgaagatcatcgacccccagcacagcgacaagcccaacgtgctgatactgggctctggctggggcgccatcagctttctgaagcacatcgacaccaagaagtacaacgtcagcatcatcagccccagaagctacttcatctacacccccctgctgcctagcgcccctgttggaaccgtagacgagaagtccatcatcgagcccatcgtgaacttcgccctgaagaaaaagggcaacgtcacctactacgaggcagaagccaccagcatcaaccccgaccggaacaccgtgaccatcaagagcctgagcgccgtgagccagctgtaccagcccgagaaccacctgggcctgcaccaggccgagcccgccgagattaagtacgactacctgatcagcgccgtgggcgccgagcccaacacctttggaatccccggcgtgaccgactacggccatttcctgaaagagatccccaacagcctggaaatccggagaaccttcgccgccaacctagagaaggccaacctgctgcctaagggcgaccccgagcggagaaggctgctgagcatcgtggtcgtgggcggaggccccacaggcgtggaagccgctggcgagctgcaggactacgtgcaccaggacctgcggaagtttctgcccgccttggccgaggaaatccagattcacctggtggaagccctgcccatcgtgctgaacatgttcgagaagaagctgagcagctacgcccagagccacctggaaaacacctccatcaaagtacacctgagaaccgccgtggccaaggtggaagagaagcagctgctggccaagaccaagcacgaggacggcaagattaccgaggaaaccattccctacggcaccctgatttgggccaccggcaacaaggccagacccgtgatcaccgacctgttcaagaagatccccgagcagaacagcagcaagcggggcctggccgtgaacgacttcctgcaagtcaaaggcagcaacaacatcttcgccatcggcgacaacgcctttgccgggctgcctcctacagcccaggtggcccaccaggaagccgagtatctggccaagaacttcgacaagatggcccaaatccccaatttccagaagaacctgtcttcccggaaggataagatcgatctgctgttcgaggaaaacaacttcaaacccttcaaatacaacgacctgggcgccctggcctacctgggcagcgaaagagccattgccaccatcagaagcggcaagcggaccttctacaccggcggaggcttaatgaccttctacctgtggcggatcatctacctgagcatgatcctaagcgcccgcagcagactgaaggtgttcttcgactggatcaagctggccttcttcaagagggacttcttcaagggcctgtga

SEQ ID NO: 997 - DNA, 1542 bp, Artificial Sequence
  source: /note="Description of Artificial Sequence: Synthetic polynucleotide"
atgctgagcaagaacctgtacagcaacaagcggttgctgaccagcaccaacaccctcgtgcgcttcgccagcaccagatccaccggcgtcgaaaacagcggggctggccccaccagcttcaagaccatgaaggtcatcgacccccagcacagcgacaagcccaacgtgctgatcctgggctcgggctggggagccatcagctttctgaagcacatcgacaccaagaagtacaacgtcagcatcgtgagccccagaagctatttcatctacacccctttgctgcccagcgcccctgtgggaaccgtggacgaaaagtccatcatcgagcccatcgtgaacttcgccctgaagaaaaaggggaacgtcacctactacgaggccgaggccaccagcatcaaccccgacaggaacaccgtgaccatcaagagcctgagcgccgtgtcccagctgtaccagcccgagaaccacctgggcctgcaccaggccgagcccgccgagattaagtacgactacctgatcagcgctgtgggcgcggagcccaacacctttggaatccccggcgtgaccgattacggccacttcctgaaagaaatccccaacagcctggaaatccggcggaccttcgccgccaacctggaaaaggccaacctgctgcctaagggcgaccccgagcggagaaggctgctgtccattgtggtcgttggcggaggccctacaggcgtggaagctgctggcgagctgcaggactacgtgcaccaggacctgcggaagttcctgcccgccttggccgaggaaatccagattcacctggtggaagccctgcccatcgtgctgaacatgttcgagaagaagctgagcagctacgcccagtcacacctggaaaacacctccatcaaggtgcacctgagaaccgccgtggccaaggttgaagagaagcagctgttggccaagaccaagcacgaggacggcaagattaccgaggaaaccatcccctacggcaccctgatttgggccaccggcaacaaggccagacccgtgatcaccgacctgttcaagaagatccccgagcagaacagcagcaagcggggcttggccgtgaatgacttcttgcaggtcaaaggcagcaacaacatcttcgccatcggcgacaacgcctttgccggcctgcctcctacagcccaggtggcccaccaggaagccgagtacctggccaagaacttcgacaagatggctcagatccccaatttccagaagaacctgtcttcccggaaggataagatcgacctcctgttcgaggaaaacaacttcaagcccttcaagtacaacgacctgggcgccctggcctacctgggctccgaaagagccattgccaccatcagaagcggcaagcggaccttctacaccggcggaggcctgatgaccttctacctgtggcggatcctgtacatgagcatgatcctaagcgcccgcagcagactgaaggtgttcttcgactggatcaagttagccttcttcaagagggacttcttcaagggcctgtga

SEQ ID NO: 998 - DNA, 1542 bp, Artificial Sequence
  source: /note="Description of Artificial Sequence: Synthetic polynucleotide"
atgctatcgaagaatctgtacagtaacaagcggctgctcaccagcaccaacaccctagtgcgcttcgccagcaccagatccaccggcgtcgaaaacagcggggcaggccccaccagcttcaagaccatgaagatcattgacccccagcacagcgacaagcccaacgtgctgatcctgggctctggctggggcgccatctcgtttctgaagcacatcgacaccaagaagtacaacgttagcatcgtgagccccagaagctacttcctgtacacccctctgctgccctctgcccctgtgggaaccgtggacgagaagtccatcatcgagcccatcgtgaactttgccctgaagaaaaagggcaacgtcacctactacgaggccgaggccaccagcatcaaccccgaccggaacaccgtgaccatcaagagcctgagcgccgtgagccagctgtaccagcccgagaaccacctgggcctgcaccaggccgagcccgccgagattaagtacgactacctgatcagcgccgtgggcgccgagcctaacacatttggaatccccggcgtgaccgactacggccacttcctgaaagagattcccaacagcctggaaatccggagaaccttcgccgccaacctggaaaaggccaacctgctgcctaagggtgaccccgagcggagaaggctgctgagcatcgtggtcgtgggcggtggccccacaggcgtggaagctgctggcgagctgcaggactacgtgcaccaggacctgagaaagttcctgcccgccctggccgaagaaatccagattcacctggtggaagccctgcccatcgtgctgaacatgttcgagaaaaagctgagcagctacgcccagagccacctggaaaacacctccatcaaggtgcacctgagaaccgccgtggccaaggtggaagagaagcagttgctggccaagaccaagcacgaagacggcaagattaccgaggaaaccatcccctacggcaccctgatttgggccaccggtaacaaggccagacccgtgatcaccgacctgttcaagaagatccccgagcagaacagcagcaagcggggcctggccgtgaacgacttcctgcaggtcaaaggcagcaacaacatcttcgccatcggcgacaacgcctttgccggcctgcctcctacagcccaggtggcccaccaggaagccgagtacctggccaagaacttcgacaagatggcccagatccccaatttccagaagaacctatcctcccggaaggataagatcgacctgctgttcgaggaaaacaacttcaagcccttcaagtacaacgacctgggtgccctggcctacctgggcagcgaaagagccattgccaccatcagaagcggcaagcggaccttctacaccggcggaggcctgatgaccttctacctgtggcggatcctgtacatgagcatgatcctgagcgcccgctcgagactgaaggtgttcttcgactggatcaagctggcattcttcaagagggacttcttcaagggcctgtga

SEQ ID NO: 999 - DNA, 1542 bp, Artificial Sequence
  source: /note="Description of Artificial Sequence: Synthetic polynucleotide"
atgctgtcgaagaacctgtacagcaacaagcggctgctgaccagcaccaacaccctcgtgcgcttcgccagcaccagatccaccggcgtcgaaaacagcggggctggccccaccagcttcaagaccatgaagatcatcgaccctcagcacagcgacaagcccaacgtgctgatcctgggctctggctggggcgccattagctttctgaagcacatcgacaccaagaagtacaacgtctccatcgtgagccccagaagctacttcctgtacacccccttgctgcccagcgcccctgtggggacagtggacgaaaagtccatcatcgagcccatcgtgaacttcgctctgaagaaaaagggcaacgtcacctactacgaggccgaggccaccagcatcaaccccgaccggaacaccgtgaccatcaagtcactgagcgccgtgtcccagctgtaccagcccgagaaccacctgggcctgcaccaagccgaacccgccgagattaagtacgactacctgatcagcgccgtgggcgccgagcccaacacatttggaatccccggcgtgaccgactacggccacttcctgaaagagatccccaacagcttggaaatccggagaaccttcgccgccaacctggaaaaggctaacctgctgcctaagggcgaccccgagcggagaaggctgctgagcatcgtggtggtgggcggaggccccacaggcgtggaggctgctggcgaactgcaggactacgtgcaccaggacctgcggaagttcctgcccgccctggccgaggaagtgcaaattcacctggtggaagccctgcccatcgttctgaacatgttcgagaagaagctgagcagctacgcccagagccacctggaaaacacctccatcaaggtgcacctgagaaccgccgtggccaaggtggaagagaagcagctgctggccaagaccaagcacgaggacggcaagattaccgaggaaaccatcccctacggcaccttgatttgggccaccggcaacaaggccagacccgtgatcaccgacctgttcaagaagatccccgagcagaacagcagcaagcggggcctggccgtgaacgacttcctgcaagtcaaaggcagcaacaacattttcgccatcggcgacaacgcctttgccggcctgcctcctacagcccaggtggcccaccaggaagccgagtacctggccaagaacttcgacaagatggcccagatccccaatttccagaagaacctatcctcccggaaggataagatcgacctgctgttcgaggaaaacaacttcaagcccttcaagtacaacgatctgggcgccttagcctacctgggcagcgaaagagccattgccaccatccgtagcggcaagcggaccttctacaccggcggaggcctgatgaccttctacctgtggcggatcatctacatgagcatgatcctgagcgcccgcagcagactgaaggtgttcttcgactggatcaagctggcctttttcaagagagacttcttcaagggcctgtga

SEQ ID NO: 1000 - DNA, 1542 bp, Artificial Sequence
  source: /note="Description of Artificial Sequence: Synthetic polynucleotide"
atgctgtcgaagaacctgtacagcaacaagcggctgctgaccagcaccaacaccctcgtccgcttcgccagcaccagatccaccggggtcgaaaacagcggggctggccccaccagcttcaagaccatgaagatcatcgacccccagcacagcgacaagccaaacgtgctgatcctgggctctggctggggcgccatcagctttttaaagcacattgacaccaagaagtacaacgtcagcatcgtgagccccagaagctacttcatcttcacgcccctgctgcccagcgcccctgtgggaaccgtggacgagaagtccatcatcgagcccatcgtgaactttgctctgaagaaaaagggcaacgtcacctactacgaggccgaggccaccagcatcaaccccgaccggaacaccgtgaccataaagagcctgagcgccgtgagccagctgtaccagcccgagaaccacctgggcctgcaccaagccgagcccgccgagattaagtacgactacctgatcagcgccgtgggcgccgagcccaacacctttggaatccccggcgtgactgactacggccatttcctgaaagagatccccaacagcctggaaatccggagaaccttcgccgccaacctggaaaaggccaacctgctgcctaagggcgaccccgagcggagaaggctgctgagcatcgtggtcgtgggcggaggccccacaggcgtggaagctgctggcgagctgcaggactacgtgcaccaggacctgcggaagttcctgcccgccctggccgaggaaatccagattcacctggtggaagccctgcccatcgtgctgaacatgttcgagaagaagctgagcagctacgcccagagccacctggaaaacacctccatcaaggtgcacctgagaaccgctgtggccaaggtggaagagaagcagctgctggcaaagacgaagcacgaggacggcaagataaccgaggaaactatcccctacggcaccctgatttgggccaccggcaacaaggccagacccgtgatcaccgacctgttcaagaagatccccgagcagaacagcagcaagcggggcctggcagtgaacgacttcctgcaggtcaaaggcagcaacaacatcttcgccatcggcgacaacgcctttgccggcctgccacctacagcccaagtggcccaccaggaagccgaatacctggccaagaacttcgacaagatggcccagatccccaatttccagaagaacctgtcctcacggaaggataagatcgacctgctgttcgaggaaaacaactttaagcccttcaagtacaacgacctgggcgccctggcctacctgggcagcgaaagagccattgccaccatcagaagcggtaagcggaccttctacaccggcggaggcttaatgaccttctacctgtggcggatcctgtacatgagcatgattctgagcgcccgcagcagactgaaggtgttcttcgactggatcaagctggccttcttcaagagggacttcttcaagggcctgtag

SEQ ID NO: 1001 - DNA, 1542 bp, Artificial Sequence
  source: /note="Description of Artificial Sequence: Synthetic polynucleotide"
atgctgagcaagaacctgtacagcaacaagcggttgctgaccagcaccaacaccctcgtgagattcgccagcaccagatccaccggcgtcgaaaacagcggggctggccccaccagcttcaagaccatgaagatcatcgacccccagcacagcgacaagcccaacgtgctgatcctgggctctggctggggcgccatcagctttctgaagcacatcgacaccaagaagtacaacgtctccatcgtgagccccagaagctacttcatcttcacccctctgctgccctctgcccctgtgggaaccgtggacgagaagtccatcattgagcccatcgtgaacttcgccctgaagaaaaagggcaacgtcacctactacgaggccgaggccaccagcatcaaccccgaccggaacaccgtgaccatcaagagcttaagcgccgtgtcccagctgtaccagcccgagaaccacctgggcctgcaccaggccgagcccgccgagattaagtacgactatctgatcagcgccgtgggcgccgaacccaacacctttggaattcccggcgtcaccgattacggccacttcctgaaagagatccccaacagcctggaaatccggcggaccttcgccgccaacctggaaaaggccaacctgctgcctaagggtgaccccgaacggagaaggctgctgagcatcgtggtcgttggcggaggccccacaggcgtggaagccgctggcgagctgcaggactacgtgcaccaggacctgcggaagttcctgcccgccctggccgaggaaatccagattcacctggtggaagccctgcccatcgtgctgaacatgttcgagaagaagctgagcagctacgcccaatcacatctggaaaacacctccatcaaggtgcacctgagaaccgctgtggccaaggtggaagagaagcagctgctggccaagaccaagcacgaggacggcaagattaccgaggaaaccatcccctacggcaccctgatttgggccaccggcaacaaggccagacccgtgatcaccgacctgttcaagaagatccccgagcagaacagcagcaagcggggcctggccgtgaacgacttcctgcaggtcaaaggcagcaacaacatcttcgccatcggcgacaatgcctttgccggcctgcctcctacagcccaggtggcccaccaagaagccgagtacctggccaagaacttcgacaagatggcccagatcccaaatttccagaagaacctgtcctcccggaaggataagatcgacctgctgttcgaggagaacaacttcaagcctttcaagtacaacgacctgggcgccttagcctacctgggcagcgaaagagccattgccaccataagaagcggcaagcggaccttctacaccggcggaggcctgatgaccttctacctgtggcggatcatctacctgagcatgatcctgagcgccagaagcagactgaaggtgttcttcgactggatcaagctggccttcttcaaaagggacttctttaagggcctgtga

SEQ ID NO: 1002 - DNA, 1542 bp, Artificial Sequence
  source: /note="Description of Artificial Sequence: Synthetic polynucleotide"
atgctgagcaagaacctgtatagcaacaagcggctgctgaccagcaccaacaccctcgtgcgcttcgccagcaccagatccaccggcgtcgaaaacagcggggctggccccaccagcttcaagaccatgaagatcatcgacccccagcacagcgacaagcccaacgtgctgatcctgggctctggctggggcgccatcagctttctgaagcacatcgacaccaagaagtacaacgtcagcatcgtgtctcccagaagctatttcatcttcacccccctgctgcccagcgcacctgtgggaaccgtggacgaaaagtccatcatcgagcccatcgtgaacttcgccctgaagaaaaagggcaacgtcacctactacgaggccgaggccacctctatcaaccccgaccggaacaccgtgaccatcaagagcctgagcgccgtgtcccagctgtaccagcccgagaaccacctgggcctgcaccaggcagagcccgccgaaattaagtacgactacctgatcagcgccgtgggtgccgagcccaacacctttggaatccccggggtcaccgactacggtcacttcctgaaagagatccccaacagcctggaaatccggcggaccttcgccgccaacctagagaaggccaacctgctgcctaagggcgatcccgagcggagaaggctgctgagcatcgtggtcgtgggcggaggccccacaggcgtagaagctgctggcgagctgcaggactacgtgcaccaggacctgagaaagttcctgcccgccctggccgaggaaatccagattcacctggtggaagctctgcccatcgtgctgaacatgttcgagaagaagctgagcagctacgcccagagccacctggaaaacacctccatcaaggtgcacctgagaacggccgtggccaaggtggaagaaaagcagttgctggcaaagaccaagcacgaggacggcaagattaccgaggaaaccatcccctacggcactctgatttgggccaccggtaacaaggccagacccgtgatcaccgacctgttcaagaagatccccgagcagaacagcagcaagcggggcttggccgtgaacgacttcctgcaggtcaaaggcagcaacaacatcttcgccatcggcgacaacgcctttgccggcctgcctcctacagcccaggtggcgcaccaggaagccgagtacctggccaagaacttcgacaagatggcccagatccccaatttccagaagaacctgtcctcccggaaggataagattgacctgctgttcgaggaaaacaacttcaagcccttcaagtacaacgacctgggtgccctggcctacctgggcagcgaaagagccattgcaaccatcagaagcggcaagcggaccttctacaccggcggaggcctgatgaccttctacctgtggcggatcatctacctgagcatgatcctgagcgcccgcagcagactgaaggtgttcttcgactggatcaagctggccttcttcaagagggacttctttaagggcctgtga

SEQ ID NO: 1003 - DNA, 1542 bp, Artificial Sequence
  source: /note="Description of Artificial Sequence: Synthetic polynucleotide"
atgctgagcaagaacctgtacagcaacaagcggctgctgaccagcaccaacacgctagtgcgcttcgcctccaccagatccaccggggtcgaaaacagcggggctggccctaccagcttcaagaccatgaaggtcatcgacccccagcacagcgacaagcccaacgtgctgatcctgggctctggctggggcgccatcagctttctgaagcacatcgacaccaagaagtacaacgtcagcatcatcagccctagaagctacttcatctacacccccctgctgcctagcgcccctgtgggaaccgtggacgagaagtccatcatcgagcccatcgtgaatttcgccctgaagaaaaagggcaacgtcacctactacgaggccgaggccacctctatcaaccccgaccggaacaccgtgaccatcaagagcctgtctgccgtgtcccagctgtaccagcccgagaaccacctaggcctgcaccaggccgagcccgctgagattaagtacgactacctgatcagcgccgtgggcgccgagcccaacacctttggaatccccggcgtcaccgactacggccacttcctgaaagagatccccaacagcctggaaatccggcggaccttcgccgccaatctggaaaaggccaacttactgcctaagggcgaccccgagcggagaaggctgctgagcatcgtggtcgtgggcggaggccccacaggcgtggaagctgctggcgagctgcaggactacgtgcaccaggacctgcggaagttcctgcccgccttggccgaggaaatccagattcacctggtggaagccctgcccatcgtgctgaacatgttcgagaagaagcttagcagctacgcccagagccacctggaaaacacctcgatcaaggtgcacctgagaaccgccgtggccaaagttgaagagaagcaactgctggccaagaccaagcacgaggacggcaagattaccgaggaaaccatcccctacggcaccctgatttgggccaccggcaacaaggccagacccgtgatcacagacctgttcaagaagatccccgagcagaacagcagcaagcggggcctggccgtgaacgacttcctgcaggtcaaaggcagcaacaacatcttcgccatcggcgacaacgcctttgccggcctgcctcctacagcccaggtggcgcaccaggaagccgagtacctggccaagaacttcgacaagatggcccagatccccaatttccaaaagaatctgtcctcccggaaggataagatcgacctgctgttcgaggaaaacaacttcaagcccttcaagtacaacgacctgggcgccctggcatacctgggatccgaaagagccattgccaccatcagaagcggcaagcggaccttctacaccggcggaggcctgatgaccttctacctgtggcggatcatctacatgagcatgattctgagcgcccgcagcagattaaaggtgttcttcgactggatcaagctggccttcttcaagagggacttcttcaagggcctgtga

SEQ ID NO: 1004 - DNA, 1542 bp, Artificial Sequence
  source: /note="Description of Artificial Sequence: Synthetic polynucleotide"
atgctgtcgaagaacctgtacagcaacaagcggctgctgacctcgaccaacacgctcgtgcgcttcgccagcaccagatccacaggcgtcgaaaacagcggggctggccccaccagcttcaagaccatgaaggtcattgacccccagcacagcgacaagcccaacgtgctgatcctgggctcgggctggggcgccatctcgtttttaaagcacatcgacaccaagaagtacaacgtcagcatcatcagccccagaagctacttcatctacacccccttgctgcccagcgcccctgtgggaaccgtggacgagaagtccatcatcgagcccatcgtgaacttcgccctgaagaaaaagggcaacgtcacctactacgaggccgaggccaccagcatcaaccccgaccggaacaccgttaccatcaagagcctgagcgccgtgtcccagctgtaccagcccgagaaccacctgggcctgcaccaggccgagcctgccgagattaagtacgactacctgatcagcgccgtaggcgccgagcccaacacctttggaatccccggcgtgaccgactacggccacttcctgaaagagatccccaacagcctggaaatccggcggaccttcgccgccaacctggaaaaggccaacctgctgcctaagggcgaccccgaacggagaaggctgctgagcatcgtggtggttggcggaggccccacaggtgtggaagctgctggcgagctgcaggactatgtgcaccaggacctgcggaagttcctgcccgccctggccgaggaaatccaaattcacctggtggaagccctgcccatcgttctgaacatgttcgagaagaagctgagctcatacgcccagagccacctggaaaacacctccatcaaggtgcacctgagaaccgccgtggccaaggtggaagagaagcagctgctggccaagaccaagcacgaggacggcaagattaccgaggaaaccatcccctacggcaccctgatttgggccaccggcaacaaggccagacccgtaatcaccgacctgttcaagaagatccccgagcagaacagcagcaagcggggcctggccgtgaacgactttctgcaagtgaaaggcagcaacaacatcttcgccatcggcgacaacgcatttgccggcttgcctcctacagcccaggtggcccaccaggaagccgagtacctggccaagaatttcgacaagatggcccagatccccaatttccagaagaacctgtcctcccggaaggataagatcgacctgctgttcgaggaaaacaacttcaagcccttcaagtacaacgacctgggcgccctggcctacctgggctccgaaagagccattgccaccatcagaagcggcaagagaaccttctacaccggcggaggcctgatgaccttctacctgtggcggatcatctacatgagcatgatcctgagcgccagaagcagactgaaggtgttcttcgactggatcaagctggccttcttcaagagggacttcttcaagggcctgtga

SEQ ID NO: 1005 - DNA, 6697 bp, Artificial Sequence
  source: /note="Description of Artificial Sequence: Synthetic polynucleotide"
cctgcaggcagctgcgcgctcgctcgctcactgaggccgcccgggcaaagcccgggcgtcgggcgacctttggtcgcccggcctcagtgagcgagcgagcgcgcagagagggagtggccaactccatcactaggggttcctgcggcccgcgttgacattgattattgactagttattaatagtaatcaattacggggtcattagttcatagcccatatatggagttccgcgttacataacttacggtaaatggcccgcctggctgaccgcccaacgacccccgcccattgacgtcaataatgacgtatgttcccatagtaacgccaatagggactttccattgacgtcaatgggtggagtatttacggtaaactgcccacttggcagtacatcaagtgtatcatatgccaagtacgccccctattgacgtcaatgacggtaaatggcccgcctggcattatgcccagtacatgaccttatgggactttcctacttggcagtacatctacgtattagtcatcgctattaccatggtgatgcggttttggcagtacatcaatgggcgtggatagcggtttgactcacggggatttccaagtctccaccccattgacgtcaatgggagtttgttttggcaccaaaatcaacgggactttccaaaatgtcgtaacaactccgccccattgacgcaaatgggcggtaggcgtgtacggtgggaggtctatataagcagagctctctggctaactagagaacccactgcttactggcttatcgaaattaatacgactcactatagggagacccaagctggctagcgtttaaacgggccctctagactcgaggtagggtgtcagtttcatcacatcatcgaattacacgtttacccaagagaagaaactaaaaaccactatgctatcgaagaatttgtatagtaacaagaggttgctcacctcgacgaatacgctagtcagattcgcttccaccagatccacaggggtggaaaactccggagcaggtcctacatcttttaagaccatgaaagtcattgaccctcagcacagcgacaaaccaaacgtgctgatactgggttcgggtggggagctatttcgtttttaaagcacattgacaccaagaagtacaacgtttccatcatctctcctagaagctatttcttatttacgcctttgttaccttctgcaccagttgggacagtagacgaaaagtcaattattgagcccatcgttaattttgctctcaagaaaaaggggaacgttacctactatgaggcagaagccacctctatcaatcccgacaggaataccgttaccataaaatcattatctgccgttagccagctataccaacctgaaaaccatctagggctgcatcaagcagaacctgctgaaattaagtacgattatttaatcagtgctgtaggtgcggaacctaacacatttggtattcctggggtcactgattacggtcatttcctgaaggaaattcccaactctttggaaataagaagaacttttgccgccaatctagagaaggctaacttattgccaaagggtgatcccgaaagaagaagactactgtccattgtcgtggttggtggtgggcctactggtgtagaggccgctggtgaactacaggattatgttcaccaggacctgagaaagtttctccctgcattggccgaagaagtccaaattcacttggtcgaagctctgcccatcgttttgaatatgtttgagaaaaagctttcatcatacgcgcaatcacatttagaaaacacttcgatcaaagtacatctgagaacggctgtcgccaaagttgaagaaaagcaattgttggcaaagacgaaacacgaagacggtaaaataaccgaagaaactattccatacggtactttgatttgggccacgggtaacaaggcaagaccggtaatcacagaccttttcaagaaaattcctgagcaaaactcgtccaagagaggattggcagtgaatgactttttgcaagtgaaaggcagcaacaacattttcgccattggtgacaatgcatttgctgggttgccaccaaccgcccaagtggcgcaccaagaggccgaatatttggccaagaattttgataaaatggctcaaataccaaatttccaaaagaatctatcttcaagaaaggataaaattgatctcttgttcgaggagaacaactttaaacctttcaaatacaacgatttaggtgccttagcatacctgggatccgaaagggccattgcaaccatacgttccggtaagagaacattttacaccggtggtggcttaatgaccttctacttatggagaattttgtacttgtccatgattctatctgcaagatcgagattaaaggtctttttcgactggattaaattagcatttttcaaaagagacttttttaaaggattatagatgaaattaacatgcccttttctggaaaaaggaaaaaaggtggtaggcaccgttttttcctgagtttgcatccttttttttctaaaaccctctaaacaaaacctaacacacacacacacgcacaaaaaaatgcacatgatgttttattatttatatattcccacttttttcgaaatgatgcttgactaatgcacaagcaaaaaaccccgacaagattggttgatcactgcggccgcaataaaggaaatttattttcattgcaatagtgtgttggttttttgtgtggataaacgggccctctagacagcggcctccgcgccgggttttggcgcctcccgcgggcgcccccctcctcacggcgagcgctgccacgtcagacgaagggcgcaggagcgtcctgatccttccgcccggacgctcaggacagcggcccgctgctcataagactcggccttagaaccccagtatcagcagaaggacattttaggacgggacttgggtgactctagggcactggttttctttccagagagcggaacaggcgaggaaaagtagtcccttctcggcgattctgcggagggatctccgtggggcggtgaacgccgatgattatataaggacgcgccgggtgtggcacagctagttccgtcgtggcacagctagttccgtcgtctagactcgagatgaagttatgggatgtcgtggctgtctgcctggtgctgctccacaccgcgtccgccttcccgctgcccgccggtaagaggcctcccgaggcgcccgccgaagaccgctccctcggccgccgccgcgcgcccttcgcgctgagcagtgactcaaatatgccagaggattatcctgatcagttcgatgatgtcatggattttattcaagccaccattaaaagactgaaaaggtcaccagataaacaaatggcagtgcttcctagaagagagcggaatcggcaggctgcagctgccaacccagagaattccagaggaaaaggtcggagaggccagaggggcaaaaaccggggttgtgtcttaactgcaatacatttaaatgtcactgacttgggtctgggctatgaaaccaaggaggaactgatttttaggtactgcagcggctcttgcgatgcagctgagacaacgtacgacaaaatattgaaaaacttatccagaaatagaaggctggtgagtgacaaagtagggcaggcatgttgcagacccatcgcctttgatgatgacctgtcgtttttagatgataacctggtttaccatattctaagaaagcattccgctaaaaggtgtggatgtatctgactcgagcggccgccactgtgctggatgggactctcgcgataactgtactgagataaagtgtggcaactcgaaaaaaaaaaaaaaaaaaaaaaaaaaaaaaaaaaaaaagaaaaaaaaaaaaaaaaagggcggccatctgcaaaattccaccacactggactagtggatccgagctcggtacggccgcaggaacccctagtgatggagttggccactccctctctgcgcgctcgctcgctcactgaggccgggcgaccaaaggtcgcccgacgcccgggctttgcccgggcggcctcagtgagcgagcgagcgcgcagctgcctgcaggggcgcctgatgcggtattttctccttacgcatctgtgcggtatttcacaccgcatacgtcaaagcaaccatagtacgcgccctgtagcggcgcattaagcgcggcgggtgtggtggttacgcgcagcgtgaccgctacacttgccagcgccctagcgcccgctcctttcgctttcttcccttcctttctcgccacgttcgccggctttccccgtcaagctctaaatcgggggctccctttagggttccgatttagtgctttacggcacctcgaccccaaaaaacttgatttgggtgatggttcacgtagtgggccatcgccctgatagacggtttttcgccctttgacgttggagtccacgttctttaatagtggactcttgttccaaactggaacaacactcaaccctatctcgggctattcttttgatttataagggattttgccgatttcggcctattggttaaaaaatgagctgatttaacaaaaatttaacgcgaattttaacaaaatattaacgtttacaattttatggtgcactctcagtacaatctgctctgatgccgcatagttaagccagccccgacacccgccaacacccgctgacgcgccctgacgggcttgtctgctcccggcatccgcttacagacaagctgtgaccgtctccgggagctgcatgtgtcagaggttttcaccgtcatcaccgaaacgcgcgagacgaaagggcctcgtgatacgcctatttttataggttaatgtcatgataataatggtttcttagacgtcaggtggcacttttcggggaaatgtgcgcggaacccctatttgtttatttttctaaatacattcaaatatgtatccgctcatgagacaataaccctgataaatgcttcaataatattgaaaaaggaagagtatgagtattcaacatttccgtgtcgcccttattcccttttttgcggcattttgccttcctgtttttgctcacccagaaacgctggtgaaagtaaaagatgctgaagatcagttgggtgcacgagtgggttacatcgaactggatctcaacagcggtaagatccttgagagttttcgccccgaagaacgttttccaatgatgagcacttttaaagttctgctatgtggcgcggtattatcccgtattgacgccgggcaagagcaactcggtcgccgcatacactattctcagaatgacttggttgagtactcaccagtcacagaaaagcatcttacggatggcatgacagtaagagaattatgcagtgctgccataaccatgagtgataacactgcggccaacttacttctgacaacgatcggaggaccgaaggagctaaccgcttttttgcacaacatgggggatcatgtaactcgccttgatcgttgggaaccggagctgaatgaagccataccaaacgacgagcgtgacaccacgatgcctgtagcaatggcaacaacgttgcgcaaactattaactggcgaactacttactctagcttcccggcaacaattaatagactggatggaggcggataaagttgcaggaccacttctgcgctcggcccttccggctggctggtttattgctgataaatctggagccggtgagcgtgggtctcgcggtatcattgcagcactggggccagatggtaagccctcccgtatcgtagttatctacacgacggggagtcaggcaactatggatgaacgaaatagacagatcgctgagataggtgcctcactgattaagcattggtaactgtcagaccaagtttactcatatatactttagattgatttaaaacttcatttttaatttaaaaggatctaggtgaagatcctttttgataatctcatgaccaaaatcccttaacgtgagttttcgttccactgagcgtcagaccccgtagaaaagatcaaaggatcttcttgagatcctttttttctgcgcgtaatctgctgcttgcaaacaaaaaaaccaccgctaccagcggtggtttgtttgccggatcaagagctaccaactctttttccgaaggtaactggcttcagcagagcgcagataccaaatactgtccttctagtgtagccgtagttaggccaccacttcaagaactctgtagcaccgcctacatacctcgctctgctaatcctgttaccagtggctgctgccagtggcgataagtcgtgtcttaccgggttggactcaagacgatagttaccggataaggcgcagcggtcgggctgaacggggggttcgtgcacacagcccagcttggagcgaacgacctacaccgaactgagatacctacagcgtgagctatgagaaagcgccacgcttcccgaagggagaaaggcggacaggtatccggtaagcggcagggtcggaacaggagagcgcacgagggagcttccagggggaaacgcctggtatctttatagtcctgtcgggtttcgccacctctgacttgagcgtcgatttttgtgatgctcgtcaggggggcggagcctatggaaaaacgccagcaacgcggcctttttacggttcctggccttttgctggccttttgctcacatgt

1-49. (canceled)

50. An isolated nucleic acid sequence encoding an immune optimised functional variant of the yeast NDI1 protein of SEQ ID NO: 542 comprising at least one conservative amino acid change to a residue selected from the group consisting of: L195, K284, K10, S143, L502, L403, A387, S86, F90, L94, K196, L19, K214, K373, L259, K511, L159, R479, L483, 182, F90, L89, V266, K214, L481, L202, L259, L195, L150, R85, Y151, Y482, S488, V45, L483, S80, and K196.

51. The isolated nucleic acid sequence of claim 50, wherein 1 to 329 codons are codon optimised.

52. The isolated nucleic acid sequence of claim 50, wherein the at least one conservative amino acid change is made to a residue selected from the group consisting of: L195, K284, S143, L502, L403, A387, S86, F90, L94, K196, L19, K214, K373, L259, K511, L159, R479, L483, I82, F90, L89, V266, K214, L481, L202, L259, L195, L150, R85, Y151, Y482, S488, V45, L483, S80, and K196.

53. The isolated nucleic acid sequence of claim 50, wherein the at least one conservative amino acid change is selected from the group consisting of: L195F, K284E, S143N, L502M, L403I, A387S, S86K, F90H, L94M, K196E, L19M, K214E, K373E, L259F, K511E, L159M, R479Q, L483M, I82V, F90Y, L89I, V266I, K214E, L481I, L202M, L259V, L195I, L150M, R85K, Y151F, Y482F, S488T, V45I, L483M, S80T, and K196T.

54. The isolated nucleic acid sequence of claim 50, wherein the at least one conservative amino acid change is made to a residue selected from the group consisting of V45, I82, V266, and F90.

55. The isolated nucleic acid sequence of claim 50, wherein the at least one conservative amino acid change is selected from the group consisting of V45I, I82V, V266I, and F90Y.

56. The isolated nucleic acid sequence of claim 50, wherein the immune optimised functional variant of the yeast NDI1 protein of SEQ ID NO: 542 comprises at least two of the conservative amino acid changes.

57. The isolated nucleic acid sequence of claim 50, wherein the immune optimised functional variant of the yeast NDI1 protein of SEQ ID NO: 542 comprises at least three, four, five or six of the conservative amino acid changes.

58. The isolated nucleic acid sequence of claim 50 that comprises at least 50 codons which are codon optimised compared with the sequence of wild-type yeast NDI1 gene of SEQ ID NO: 1.

59. The isolated nucleic acid sequence of claim 50, wherein the nucleic acid comprises at least 100, 200, 300 or 329 codons which are codon optimised compared with the sequence of wild-type yeast NDI1 gene of SEQ ID NO: 1.

60. The isolated nucleic acid sequence of claim 50, encoding an immune optimised functional variant of the yeast NDI1 protein having at least 90% or 95% sequence identity with SEQ ID NO: 542.

61. The isolated nucleic acid sequence of claim 51 having a sequence selected from SEQ ID NO's: 75-145, 165-243, 264-341, 362-441, 462-541, 705-824, 835-884, 895-944 and 955-1004.

62. An isolated nucleic acid sequence encoding yeast NDI1 protein of SEQ ID NO: 542 or a functional variant thereof having at least 90% or 95% sequence identity with SEQ ID NO: 542, wherein the nucleic acid comprises at least 50 codons which are codon optimised compared with the sequence of yeast NDI1 gene of SEQ ID NO: 1.

63. The isolated nucleic acid of claim 62, wherein the nucleic acid comprises at least 100, 200, 300 or 329 codons which are codon optimised compared with the sequence of wild-type yeast NDI1 gene of SEQ ID NO: 1.

64. A nucleic acid construct comprising a nucleic acid sequence of claim 50 and a nucleic acid sequence encoding a mitochondrial localisation sequence.

65. A protein encoded by a nucleic acid sequence of claim 50.

66. A vector comprising a nucleic acid sequence of claim 50.

67. The vector of claim 66, wherein the vector is an adeno-associated virus (AAV).

68. The vector of claim 66, further comprising a gene that enhances cell survival and or cell function, wherein the gene that enhances cell survival or cell function is optionally selected from a gene encoding a neurotrophic factor, a growth factor, an anti-apoptotic agent, an antioxidant, a cytokine, or a hormone.

69. A cell transformed with a nucleic acid of claim 50.

70. The cell of claim 69, selected from a group consisting of a stem cell, progenitor cell, RGC, and RGC precursor cell.

71. A method of treating or preventing a neurodegenerative disease in an individual comprising a step of delivering a yeast NDI1 gene, or a variant thereof, and a neurotrophic factor, to the individual.

72. The method of claim 71, wherein the neurodegenerative disease is LHON.

73. A method for the treatment or prevention of a neurodegenerative disease, the method comprising a step of delivering a vector to an individual by means of intraocular delivery, wherein the vector comprises a nucleic acid sequence of SEQ ID NO: 1 or a nucleic acid sequence of claim 50, and wherein the vector is an adeno-associated vector (AAV).

74. The method of claim 73, wherein the neurodegenerative disease is LHON.

75. A vector comprising a nucleic acid sequence of SEQ ID NO: 1 or a nucleic acid sequence of claim 50, wherein the vector is an adeno-associated vector (AAV) and comprises a promoter in which the nucleic acid sequence is under the control of the promoter, and wherein the promoter is selected from (a) a promoter that is preferentially or specifically expressed in retinal ganglion cells and (b) a promotor that is specific to rod photoreceptor cells.
